United States Patent Application Publication US 2024/0093182 A1 - sequence listing, part 20

SEQ ID NO: 42607 - DNA, 1708 bp, Artificial sequence
  DNA replication origin
ttcctgccccttcccgcgtcgctcccgcctggagcgcgtcccccgggatgccccgtcccccggccactcaccagcaccacggagccccgcacggcctcagacacgctctgccggagctcagccgccgtgccaggcttgctgagccgtttggtgaatttgcgcacttcggccatggcagcggcggcgggcgggtctcggcgggcgggcggacctcggcgggcgggtggactcactgccccggcccgcggcggccgcggccgctgctgctccctctgtttactcgccggccggccggccacatcgcagctcggcggcggcgcggctcacgctgctcctccctcccacctcccacccgctgctcctccctcgttccctccttccctccttttctcgctcgcttcgcccgctcactgtcctgccccacggcgtcggcggcggcagctccctcccctagagggcccgagctccgatcgccaccagccgaagcaggagggtgtgtctgatggggaagggtgtgtagagggggagggagaactggaggtgggggcgagggtcacgagggaagaggggggaagtggctaccgctcgggctccgcccgcagctgatgttgctggtgcagccgcatccgggaggggagatctgggctgcttctttttttccgcttgagtggggagggcggggtggggtgggggaacagagaggggtgatgaaatgtctccaagagtggggcgtgctcctctcccgccctagtgctcctctcccgcctccgagctgcagtgcccgcaggagggctggagaactctcacgtccctccaccccgcaagcccccagggcccaggcggctaggggctggaaaacaacgtggagcagccgccttttgtgtgctccttggggaagggtcgcaccaatgtcgaaggacagagagctgctttccagcgtgagcggctcgactgggtccccctcctcgcccacaccgttttcctactcagttggctcacctaacagggggcaacactggggagagagcatgcttctggaagtgggaacttattgtggcggcacccctcgctccgtcccccacgggggagagctgggtggtggagcctgagcctgtggcaggtgatccctaggtcagcactgactgcaccaggagtggggtgggggtgggcattaggatgagcctgtggcaggtgatccctaggtcagcactgactgcaccaggagtggggtgggggtgggcattaggaaggccatctccctgggtttggtggacttaccaatcttatagtagcttttacaagtgccctgcactcacctctccatttcctattcatctccttactcttttcagcttccaagaaattgtttttccaagaatcaaagaacatctcataacagggtataaaacgaacatgcttaagacagaaatagggacgggaatcttgaagtactagtgaccctgtcagacctcctgaagtgcagagtgaaaggctccactgatggtggcagttttctatctggttatttcatttgttgagagtttgaaaatggccctcagtctgggggaccgagcagcccttctgaaagcagtcctaccaccacccatcgggcactttccccaccctcaaagaccaaacagtcttttaggggactttattatggaaacaagggcatgcgtggtgatggtttctttgaacccagaaaagg

SEQ ID NO: 42608 - DNA, 1924 bp, Artificial sequence
  DNA replication origin
gcgatgtggccggccggccggcgagtaaacagagggagcagcagcggccgcggccgccgcgggccggggcagtgagtccacccgcccgccgaggtccgcccgcccgccgagacccgcccgccgccgctgccatggccgaagtgcgcaaattcaccaaacggctcagcaagcctggcacggcggctgagctccggcagagcgtgtctgaggccgtgcggggctccgtggtgctggtgagtggccgggggacggggcatcccgggggacgcgctccaggcgggagcgacgcgggaaggggcaggaacggcgccagtgcggccgcttggtgcgccgcgcgctgtctttctccgctccagtaagttttcgcaccggcagccgccggccggggtccgagtcccaggcgccggctgacagctctccggccgcccggcacggcggaggcgtgcgccgggatggaagcagacgggcaaaagccgggctcggacggctgcggaggaggcggaggcggaggctcccacccagggtcggggccgggggtgtgagctaaagagctgacctcgcgctgctctggactcggcacaaagagccggggacaagggcacgacgagatcctgatcccctcccgcgagcacctgaggccgcctaggcggaaggatgcgatgagcgtttggcacacacactctcgcgcgcacacatacacacactgtgtacacaaaaaagaaccccacccagaaagccccgggcgcccaagctcgggctggcggtgagaacagaggaagcagagcgacttcctcctgcaactggggagagagggtggtgatgggtgttgaaggggtgctgctgcggaggaagggcattagaaacaacggggttctgcgacagagtgggcgcagggtcatccaccgcagggagagtgtgtccctcggggacacgcgagcgctccagaggcaaggggaccaaggggacggtgccgtggggatttgggggaagactgggtgtgtcagtccagggatggaggacctggggtcagagccccacagctcaggactgggggatggggattcgaaagcgcgctgactccctgggaaccctcccagagcaccctcagccttatccagattgtctgactctggagaaaggctaaagggtgctaacgggcacttgccccttctcttgttttcaagacactcgttgccagtttcctggacaagcgaacaaaccctgaataagcaatcggactgattaattagtgtttgttttgttactttgttttttggttgttgtttttgtttgtttttgtctccctcagctccattttacagcgagtcgtttgctgtgtttaaatttcaccgtttaagagagggctctttttgttaaaacaacttgtcatcggaagggaacttcacagcttttccttgtaatttttctgttgatcttgtagaatcagcaataaaacccagcattaaagggaggccaggggcttgatcccaacagtggagaaagttgacattagtgggagttctggaggaggatcaaaggtaaactatgtacctttgagataaagatctgatccctaatagctacaactgtgcaaacctaagtgactttaaagaaatctctttattgtggctagacccttgaaagtttaattctgctgtttagtggagctaaatccagacctttaatgttactttaatggacttggcttgtgtatttcagtctgattttggagtgaggacctgttgaggtcagattggagccttgcctgtcatcacagccagttaagagaggaaggcaagctgtgtgcagagcatttataccagggctctcatcttgggtgattgttaacacgtgattcaatctacctagcagagaacgctttcctaaattcagagaaaacaaaaaaccttccttgagcggggtt

SEQ ID NO: 42609 - DNA, 1064 bp, Artificial sequence
  DNA replication origin
ccgccggcgccccgccccgcctcctccggccgctctcgccggctcaggttacctgaggccggtgggcggggcggcccttcccgtctgcgccggcccccagcctccagggcggcggagccgggaagtggaagagggagcgaaggaggcggggactgccaaggctccagcccggccgggctccgaggcgagaggctgcatggagtggccggcgcggctctgcgggctgtgggcgctgctgctctgcgccggcggcgggggcgggggcgggggcgccgcgcctacgggtgagtgcgaccctcggggcccgaggggcggccggagggctgagggcggtgagggtcacggctgaaaggccccggaggtcaacgccgggcggagggccgaagctggggtgggtgctgggggctgccctcgcgaggccccgcgctcggcggctgcggcttcccgcgcgggatctctggggcccggtactggggccggttcgaggtgggacccgggagctgcggggttttcccgaactccgggtgcggcggaggtggcggcagcgaagtaagagggctgcgacttgtagtgggaagagcccaggaggctggcgtccaggcgtgcgggggcggggggcccgaaacatgcccacggcgtcagagggccgtgggtcagcgcccggaatgtcgcctgtgagcccgggaggaaatgaggcgccagagccggcggggaccacgaccgaagtccaggcgagctgagaacgcgccggggctctttgcccgaggccgcgccaatcctcactgtctaagggtggctcttgcgagtggaagttgaagggaacctctaaacatctcagtccttgttgaaaaaggacgtgacgctcatgacctcctctggcgtcgaagaaatcctttgggaaatccagaatagcatcccggcagatgctccccccaccccactctctttaataaaccttatattttagggtaattgtagatttatggaaaagttgcaaagatacttcagagagttgtgtatatccctcaccctgtttggtaacttctagttaatcaacctggcag

SEQ ID NO: 42610 - DNA, 754 bp, Artificial sequence
  DNA replication origin
atcaagctgcacttgacgctccgcgggcctgctgcgcccccgccccctcaggcgaaaactcgcctctgcccaaggctgtgcggggcgtccgcccccgcacttcgctgattggccgcactagcccgctcgtcacgctcttttgtctcagctggcagaggataaaagccgccgcggctgccttaggaacggcgctgcctcgtctctgctacccctggttgggcggccctgcgaagcagctccttcgggcagccccgggtcgcttagcggccaaggaggcttcagttctttgccgcctgcaaggcggagaccagaaggcggaatccacagctggcgacgcgggagcatctgctgtccaccagcggagcacaggtaaagaatgggggtgtgattgcccggcggggagaggggtgggggaagacccaccagtactgggcggctcccagcttggagaatcggtgactgtgaggcaggggtaggagtactctcgtggcccggctgcgctgagggaggaggtggggttcacctggatactgcgggctaggtaggatttgcctggatttgggggtgggaggagaggcgaggagtagcggggggaggaatctcgagctgtttgcttcgaacatcctttgcatctcctcatctctttctgggaggaatatgtgggtgggtgtgtccaactcctattccctttctccgtggcaggccatcaaagccgcatctgaacttgaattctgtgcagctgattgcagagctg

SEQ ID NO: 42611 - DNA, 707 bp, Artificial sequence
  DNA replication origin
aaggaggcttcagttctttgccgcctgcaaggcggagaccagaaggcggaatccacagctggcgacgcgggagcatctgctgtccaccagcggagcacaggtaaagaatgggggtgtgattgcccggcggggagaggggtgggggaagacccaccagtactgggcggctcccagcttggagaatcggtgactgtgaggcaggggtaggagtactctcgtggcccggctgcgctgagggaggaggtggggttcacctggatactgcgggctaggtaggatttgcctggatttgggggtgggaggagaggcgaggagtagcggggggaggaatctcgagctgtttgcttcgaacatcctttgcatctcctcatctctttctgggaggaatatgtgggtgggtgtgtccaactcctattccctttctccgtggcaggccatcaaagccgcatctgaacttgaattctgtgcagctgattgcagagctggtaggccgacggcttcccgggggaaatgtaatgctggagggtggggggctggtctctggcttatagtcaggagggggcagagagaatttttcgcctggcaacagcggaggtggtgggtagcaggatgacgggtgaagctgcttctaacccttcccttctctggccttctccgctgtggcgcaatcttgaaacctcaaggacccggatctgcgaccccctgtg

SEQ ID NO: 42612 - DNA, 797 bp, Artificial sequence
  DNA replication origin
ccaccgaggtgtgggacggctttaagtgccggaaatgtcatgggtttctatcagaccccgtgtccttgtcgtgtggccacaccttttgtaaactgtgcctggaacgtgggcgggccgccgaccggcgctgtgcgctgtgcggggtcaagctctccgccttgatggtggccactgggcgggcgcgtggagcccggcgggctgggcagcagccgccgccgccgctgcgagtcaacgtggtgctcagcggcctcctcggcaagttgtttccaggcccagcgcgagcgtcgcaactccggcacgagggcaaccgactgtaccgcgagcgccaggtggaggcggcactgctcaagtacaacgaggcagttaagttgggtgagtccaacgcgctgccgggccggggctggggctcggtggctacatgagggagcgggagaacaaaccccgcagcgagaagggatttggaccagggcagaagagggggcgggggacccatggactgtggcggggtgggggaggggtgattctggggctgggtctctgagtttgttctgttttcactgcttatctgtgtttcactgtgtttgtgttgatctcggttgctttttgtcttttcctgctacttctgttagcttttgtgttcctgtctctcagtccccgttcctgtctgtgtctccttgcttctggttctttttctccgtctcttcgtatctttgtcactgtttctttctttttcggtgtcactgtctctgttcctctgactctccttctcccgctgcactcctggtctcctcttacac

SEQ ID NO: 42613 - DNA, 1824 bp, Artificial sequence
  DNA replication origin
gactctggccccgacagtggcaacactgtggccggagtcgcagggcccatgagaggcctcggggaggaggagggtgagcaggcggcaggcttggccgcagcccccgggggtgggaacgccgaggaagactcagagatcaggatagtagtggagatggtggaggaggaggaggatgaggaggaggaagaggaggaggaggaggaagagaggaacgaggcggacaacttcgacttggtcgcggccgcccgtcgctaccccataagaggctttcgcatggagtttctggacatggtccactcccttctcctccgcatctatcacaacgaccacatcctgatcaggatgcgtggcggccgcctgatgcggaggcgccgcactgcggcgcccagtggctcagaagagccccggctgttgctggtgcatgagaggctgggcgtgggggccgcgggtcctgagggcgagggcctgggcctgctccaggaggccgcgttggtcccagagcctgaggtgccagcagacctggccgagatggccagggagcctgcagaagagcccgcagaggaggcctcagagaagcccacagaggaggccgcagaagagcccgcagaggaggcctcagagaagcccacagaggaggccgcagaggaggagctcgcagaggaggccgcagaggaaccggccaaagaggaaccggctgcagaggaggagtccgcagaggaaccggccacagaggaggctgctgcccctgagggtgaggaacaggctatctgcagtggcggggagacagggacccgtgcacccaagggttccaggcagggccgcggtgtgcgcacagctggtgaagcaggtggtgaagtgggggtcgggcctcgggtggtgaagtgggggtcagggccctcctgaaacttaaggccaaatgtgtaccaatgagtcgaagcccaattctctaacgacatctatgatttttgagaaaacatgccgccctctaccaacctgtgtttgatagaagatctgagatcatcaatgccatttggggggcccacagatgaatggccaggtagataggggttcaggagggagctcggcaggaaacaagggacaacggaaagaaaagaacaggcaaatggcaggcatccttttttgttcatggcttttcaaagtgtaaagattcttagaaagttgatccccaaatgatgaagtgatacaggggcccttggtaaaaatgaaacattcaggggggtgaggaaccaatgagcttcaccatagaatttgtcttttgaggcaacaaatattttcccagcaaagttctgatcaaaacacttagaatgagatcagacaccatgattctgatctcttctccaaagaactagaaataatcggcagctttgggtgggagatttactggaaaaaagggaaatagtgtcactgtggaaatgatcaagcagcagcaacgtgagggccatggcactgttgtgaaaaccagtaggaaggtgcccagctattcctttcttagttaagtctatcctcctgcttctcctgagggtggagtactgggtgccgctgctggttataaattgggctatattttctgtgaatgtctggtcccaacatctgtattattcttcgctaaagaagtcactaaatatcagcatgaaaagtgggatgaagaggcccaagatgctgcaggcaaggaagagaaagaagagaaagagaaggatgctgaaaacaaggtgaagaactccaaagggacctagacgcagcagaggggaagctgagaaaatccaggtatcggtgtatagctttgagaatcactcaactattcct

SEQ ID NO: 42614 - DNA, 1496 bp, Artificial sequence
  DNA replication origin
gtgagtctcaccactctctcgccaatagtgtgttatccttttttttttcccttttatctttcctgtagaaaagtagtaggtgacagcggcatctccatgcttttctttttgttactaatgagactgaacatttttcatatgcttattcaccactggcatgctctcttttgtgaactacctgttcctattttttcccatttattgactagaatcttatacattttcttatcaatccaaatgatctctcaaataaatattaaccctttgtcatattagttgcaaatgaaaatattttataagtttattagctttctaaattttcttggccatacatgttaaaagagatagattctaactatagacaagtgccctcagtttgagcctgtttctccatgattaaattgaagagttttgacaaaagatttggaggggctgtttcagctaatcccaaatttagctctgagaaaaatgcctgggcccgatacaaagattgtttggctcattgcactttataatgatttaagaagatgtggggggcagggatggaagcagtttttgccagaaatttttagaattctgaggtaggaagccaatctttactcaagtctcttgcgtgttgggaggaggagtaagttatgtgcaagccaacagaacacttggtggaaaagtactgctctgggctgcagatgtgtgcacggcttggttttaattatttgtttccctctctatcctttcttctcctcccctccccccgccaccagaaaaagggccagattaggacgaggcaaccccttcctccgtggaggtctgcttctgtgcagcctgttagcacatcaaaggccggatgaaatacctaggaaaggaagggaccaggcctaggatccttccaaactcccgcctttgtctgggctccagctcagggttattgtgactgccaagggtagcctgacagactccaaatagaagaacgctgccaaacaaagaaactttcacattattctgaggggggaaaaaagagcaacaagagaacgttgcttgttaatgcctggtgactgagcaaatcagtaattgcaaaagggtttttcggagaacaaacccaaagttaactgggcgatcagattcgtttccccagataatagggagagttgtgcactgactttagcaatcccgggggtgtcggtcccacagcatctgggggagaattggggaagggccatcaaggagagcgaatgggggttcccaaggtgaaaatgagtcgtgtagggctctaacatagaaaatggagttcgaagaatgagtttcctgtctcctaagacagcttggagggcccgggaacggcagggggaagatgaggggcttcagaatgggaggcagggaaaagcctgcagcaacagaaagggagtcggtgtctggcgcgcatcaggtggcggaggggcgctcgcacagagcccggcaatgccgaggccctcccaacgggtcggtctgcgaggagcaaa

SEQ ID NO: 42615 - DNA, 1267 bp, Artificial sequence
  DNA replication origin
gcggcgacagcgacgacgacgagccgccccctctgccccgcctcaagcggcgcgacttcacccccgccgagctgcggcgcttcgacggcgtccaggacccgcgcatactcatggccatcaacggcaaggtgttcgatgtgaccaaaggccgcaaattctacgggcccggtacgcggccggcgaggggggcttggagacaaaagaagggggccccggcacggggctgggcgggagagaggcgaggcgggagcggggcgcccctgagtggagggaggaatggcggcgagctagggtaggcgggtaggcgggcaggcggagagccgggaggctcccggggcgggcagggaacaagaggcgctctagaggggctgcgggccagtcagggacgcggatccccggcccgcgctgacagcgctgggagggggttagagaaagaaggctgaggcgcttaagccgggggtgggtgggaccacgaagctcgaaggcgttgaggggggacacatcaaagcccaggctgttggggtagttttcgaaggtcctgggcttggggattcctggaaggaggagggggtagtgtcgggttctaggaaggaaatgagggtgttccgagggaggcatgggggagggcgagagtgagaaaaggtccagacctagagaagacgggaaggccaatgacaccgggagtaggtttgaaatatgagggtgtgggagaaaacgccgagacgggattagcagcaggtaaaagctttgtgcccggtggatagtgatgtgtgtgtgcactcgtggtgtgtgcatgcgcggtgtgtgcgtgtttagtgtatgtgatttatcaggggtgtgtgtgtgtggtgtgtgcatgcgcgcttgaaatgggtcatgcgtcaggtatgtgtgtggcatgtgtttggtctgtgtgcgcttgtgctgtgtgtggcagatggggaaaggctggaaggtgaacaaggaggaagggggctgtttgagggaggaataaaggctgaatatggtggacaatggtaacgtggcaagcttttaaggtaatatggtatttagtctatagcaggagagaaaggattagaagccaagaaaaattaaaatggagggagggagaagtgggaggataccaagaaacaaaaggagtagagctaagaagactgctgggtggggggatatcaggaaaagccaaccagagggaaatgaagaatggatgactgctgcactgctgagctgttggagaaggcaggcctgatgggttccttagaggcga

SEQ ID NO: 42616 - DNA, 1426 bp, Artificial sequence
  DNA replication origin
acgggggagtagcatgatcaaagcctcgaaatcttcgggagtagcggcgccttggggtaaactttggctcggcctttgcagcaggagaggggcggggttacttgaagggctcctcaggagaaggcgattggccctgggggaatcagggggcgggaagagtccatcattgccactggtcttgcctgcaagttcagggcgagccgccagggcggcagagctctgagggcagcccgcgcgcgggcagacgaacccgcagtcgcgagctactaggcagccgcggtgagctcgccagagcctcaggggatcgaggaggtcacggggcgttggcaccgggtcgcgcgccagcgttgccctcttagcgaggacgcttctgcgcgcggtgagctcgacgcgagccattcaacagctggcctcgcgagcgacagtcgcacggggtgactgggaccgctgacggttgcgactgcggcggttagagggaggcgacgacggcggcatagacgttggcggcagcggcagggacggcggcggcagtcccgttatcctaccggatcctggagtagagacgaacggttcctgaagctcccggtaaatgccctcggctctgtcctcagaggaggcagccacgctgggccttcggtagggactggggaggggctgcgcaagagacccgagttccccgcttgccccagcagagtcacgttttccagagtaacgcctaggctcttccaggtccactctcccctcactcgagaccccgctgagccagggagcgcaccggaacccactcgagggctcacccaggccgctgttgggcgaaggtcgaggcattcccctgaggcacgttggcagtgacatcccgctaatgggaactgaaggtgccctctcctgctcgaccggtacgccaagtgcccatcattagcagggctctgccgctgccgccccctgatgaccctcgtccttggctttagggacttctcaagagattctgagtctcggcttgaggtttccggcggggtggattaagaccgttttaatctgactgtggcttgctcacccacaacgctttcgggatgcaagatcctgagcttgggttggtgggccgagaggcgaggggaagaatcaagttggggaggcccatgctgtaggatatgcatgccatacccgcactcaggggaaatcatagtcgtggtccttgggacccgtgccgccttttggtctcctgctttttgtgtttttatttaaagtcgaccattacaggaggcagaactttctagtgctgctaactccgaggggtaacaaacgtgtattggaacgctgggttccagtatgggaaactggttaccctttgggcctcttcttggtgtcttttctagattgagaatatgatctcaaagatcatgcccatttcgccctgttttccggccta

SEQ ID NO: 42617 - DNA, 1208 bp, Artificial sequence
  DNA replication origin
aaaaatggggacaaaaaatggaatttcggtcacagttttttaattagtactaaatacctttatacagtttgtatatgtaaaacccttttcatggtacctaacacaataaggaatagctattaaattttcaggtcaatttatttaactgaaatgattatgtatactgcatcagtgtacacagatttgttttatattggatggaatataacttaagagattaaatgatacaaaatatggttatatttgattttattttgaagcataaaaatattcaaaatattataactatattaagctatattctgtagttttaattatatattaaaactatattctatagaatgggccttgtgatatggaagtcaagaaagtgaatgctacctgagggagctccaccagagaagtctatataagggacttggccatcctggtctcctctgtgctgaagggtctatactctggggtggggtggggtgtaaaggatagactcagttcctgccttccactttcaaaagatataaaggaattaaattcagagacgagccttgaacccaggtctttagagcaacagagcctggaggaacgtggctggaattgtgttcaaattgttggaccaccatgggcaggaggaacaagactgactttgcatgtcctcaaacgtgcagaagttaccaggggaccggtttcgctcactctcaagccaggaagtcggagacccgaacggtggtacacggagccagtgagtcctggtcgctggaagttggccagcctccgaaagcaggccccagaaacagaaaaaaacaatgcgaggatagtcagtcgatggcctttgtggttcttcctcactccctgatgtgtaaatttggccgagcgcgtggccacttctcagcagtcccacttcagggatgaggtgaacaacatcacctctctcgttagttgtatactcgttttttcaaaggaaataggtcgcgtgggggttagtaggccaagtgagtttcagcctctaaatcactgtaacttcgtaggggttgacgggggagtagcatgatcaaagcctcgaaatcttcgggagtagcggcgccttggggtaaactttggctcggcctttgcagcaggagaggggcggggttacttgaagggctcctcaggagaaggcgattggccctgggggaatcagggggcgggaagagtccatcattgccactggt

SEQ ID NO: 42618 - DNA, 1096 bp, Artificial sequence
  DNA replication origin
ctggattctgcaccgggactgcaggtgcagctgcatgccagtcctgcgccatgcgcccgcactcctcagcccttgggtggtcaatgggactggccgcagtagagcaggggacagcactcatcggggaggctcgggctgcacaggagcccacggagggggtgggaggctcaggcacggcgggctgcaggtcccaagccctgccccacgggaaggcagctcagccctggtgagaaattgagcgcagcgccagtgggctggcactgctgggggccccagtacaccctccccagccgctggcccaggtgctaagcccctcattgcccggggccggccgggccagccgtctgctccgagtgcggggcccgccaagcccacgcccacccggaactccagctggcctgcaaacgctgcgtgcagccccggttcccactggtgcctctccctccacacctccttccacgttggggagccggctctggccttggccagcccagaaaggggatcccacagggcagtggtgggctcaagggctcctcaagtgccgccacagtgggagcccaggcagaggaggcaccaagagcgaatgagggctgtgaggactgccagcatgctgtcacctctgagtggcacacacctgggtaccagctacttgggaggctgaggtgagaagatcattttgtgtccggaattggtgggtttttggtctccctgactccaacaatgaagccgcagaccctcgcagtgagtgttacagctcttaaggtggcgtgtttggagtctgtcccttctgatgttcagatgtgtttggagtttcttccttctggtgggtttgtggtctcgctggctctggagtgaagctgcagaccttcacagtgagtgttacagctcttaaggtagcacgtctggagttgttcattcctcccagtaggcttgtggtcttgctgggctcaggagtgaagctgcagatctccacggggagtgttacagctcataaaagcagcgtggacccaaagagtgaacagtagcaagatttattgcaaagagcaagaaaacaaagcttccacagtgtgaaaggggactggagtaggttgccact

SEQ ID NO: 42619 - DNA, 1274 bp, Artificial sequence
  DNA replication origin
acatggcaaccatctgatttctcaatctttcccccacctttcctgcccttccattccacaaaaccgccattgtcatcatggcccgctctcaatgagctgttgggtacacctcccagacggggcggcggccaggcaaaggggctcctcacttcccagtaggggcagccgggcagaggcgcccctcaccttccggacggggcggctggccgggcggggggctgacccccccacctccctcccggacagggcggctggctgggcagaggggctcctcacttcccagtaggggcggccgggctgaggcgcccctcacctcccggacagggcagctggcctggcagggggctgacccccccaccaccctcccggacggggcggctggcctggctggggctgacccccatctccctcccggactgggtggctgccgggcggagacgctcctcacttcccagacagggtggctgctgggcagaggggctcctcacttctcagacggggcggctgccgggcagaggggctcctcacttctcagactgggcggttgccaggcagagggtctcctcacttctcagacggggctgccgggcagagacgctcctcacatcccagacggggcggcagggcagaggcgctccccacatctcagacgatgggcggccgggcagagacgctcctcatttcctagacgggatggcggccgggcagagatgctcctcactttccagactgggcagccaggcagaggggctcctcacatcccagacgatgggcggccaggcagagacgctcctcacttcccagacggggtggcggttgggcagaggctgcaatctcggcactctgggaggccaaggcaggcggctgggaggtggaggttgtagtgagccgagatcacaccactgcactccagcctgggcaccactgagcaccgagtgaacgagactctgcccgcaatcccggcaccccgggaggccgaggctggcggatcactcgcggccaggagctggagaccagcccggccaacacagggaaaccccgtctccaccaaaaaaacacgaaaaccagtcaggcgtggcggcgtgcacccgcaatcgcaggcactcggcaggccgaggcaggagaaccaggcagggaggccgcagtgagccgagatggcagcagtacagtccagcctcggctcggcatcagagggagactgtggaaagagagggagagggagaccgtggggagagggagacggagacggagagggagggggagggggagggaga

SEQ ID NO: 42620 - DNA, 946 bp, Artificial sequence
  DNA replication origin
cgccccgtctgggatgtgaggagcgtctctgcccggcagccccgtctgagaagtgaggagaccctctgcctggcaaccgcccagtctgagaagtgaggagcccctctgcccggcagccgccccgtctgagaagtgaggagcccctctgcccagcagccaccctgtctgggaagtgaggagcgtctccgcccggcagccacccagtccgggagggagatgggggtcagccccagccaggccagccgccccgtccgggagggtggtgggggggtcagccccctgccaggccagctgccctgtccgggaggtgaggggcgcctcagcccggccgcccctactgggaagtgaggagcccctctgcccagccagccgccctgtccgggagggaggtgggggggtcagccccccgcccggccagccgccccgtccggaaggtgaggggcgcctctgcccggctgcccctactgggaagtgaggagcccctttgcctggccgccgccccgtctgggaggtgtacccaacagctcattgagagcgggccatgatgacaatggcggttttgtggaatggaagggcaggaaaggtgggggaaagattgagaaatcagatggttgccatgtctgtgtagaaagaggtagacatgggagacttttcattttgttctgtactgagaaaaattcttctgccttgggatcctgttgatctatgaccttacccccaaccctgtgctctctgaaacaagtgctgtgtccactcagggttgaatggattgagggcggtgcaagatgtgctttgttgaacagatgcttgaaggcagcatgctcgttgagagtcatcgccactccctaatctcaagtacccagggacacagacactgcggaaggccgcaaggtcctctgcctaggaaaaccagagacctttgttcacttgtttatctgctgacctt

SEQ ID NO: 42621 - DNA, 1309 bp, Artificial sequence
  DNA replication origin
caccccacccccgtccggtctcccggttccccggccccgcccggctcttacttgcggtaggcggcgagctgcacggcgctgcaggggaagaggcgcaggcacgccaccgcgttccccttccacagggcccggagcccctctgcccgccacacccggtgccctgtggcccacggtccccgggcgtggcctcgcacgacgccaacctgggccagcacggtggcgagctccaggggcgcggtgaggctgaggctgagcgtccccgccagcccagcgcacagcagcctttggccgcctgtcagtcggccgtcccgcctccacgtagccatcgagccccgacccgggcccggaagaccgcgtggctcgggcctggggctctccggccacgggcggaggtggcgggccccaggccccgcccggcatggggcgggcccgcgtgagggacgggaagccccgtctacgccctagcctggcccgaggctggtcgggggtggggcgcgagggcctggagggtccggggtccgaggccgcggatatcatgggcatagtctccccagttggcaaggctcgagtagcgactttcagttgcgaaacagttactgttctctcaaggcccagcctgctagacatcttgcttcctaaatgttcagtgcgcccccgccgcccctccctgcctctcctctggtttgccccttttctccctttcacgtgccacttctctgtcttcctcccctggcgcttccctcctcctcctcttgcctccaacccatttttttttcctgcctaaccaaaaagccttgatggtttcccagtgcagaaggtaaaaaattctaacaaccacagttgctatctctcaggcacttgtcaagtactgggctttacagacgttctcatgtaatcctcaaaacggccctaagtacgtatgtcctcattgacagaggctgtgtgggtgtggggacttgaatctggactcttgaacctgtgtaagattcttggctctgcagcttaccagctgtgggaccttggggaagtcactcaacctctctgtgtgtcagttgctttataaaacagagattataattttttcctcctaggggttgttgtaaggattaatgaacaatgactggtatgggtaagcagtttatatgtgttagttctgattaggtattcatttacaggagaggaaaccaagacacagagaggacttgctcaggctcacacagctacctacaaagcagagaccggtttgaaatctagggcggtttatgtcagtttccactaacggctacactatatgtctactaggactgca

SEQ ID NO: 42622 - DNA, 1643 bp, Artificial sequence
  DNA replication origin
tgccgggcggggcctggggcccgccacctccgcccgtggccggagagccccaggcccgagccacgcggtcttccgggcccgggtcggggctcgatggctacgtggaggcgggacggccgactgacaggcggccaaaggctgctgtgcgctgggctggcggggacgctcagcctcagcctcaccgcgcccctggagctcgccaccgtgctggcccaggttggcgtcgtgcgaggccacgcccggggaccgtgggccacagggcaccgggtgtggcgggcagaggggctccgggccctgtggaaggggaacgcggtggcgtgcctgcgcctcttcccctgcagcgccgtgcagctcgccgcctaccgcaagtaagagccgggcggggccggggaaccgggagaccggacgggggtggggtgggggagccgcggcccgacgccgccctgctgcctggactcggggccctggagtagggacggcccccttgtcgatcacctggggacccctcggggcggtgggccacctctatggcccccagagtgcagccccaatgcttttcacgttctcttggggttaccgccctgcaagatgcagttttgtggtccgcagccctggtccgagaggctttccggattggaccgggcgaggaggtggaatgcagcaaaggatttggaggaaaggaatgaaaagctctccagagagatgagtcctaaccatttccaccgtcctccaatttggaaacttttgcttaggctggcttaggaagagagagacccttttaaaggtgtttttgtctgtgtgacccaagccccgagaagaaagtgcttggtgtggggaaaggacccgatccatcgatacgaaaaggccgcagatttttgcccacacatctccccaacttaaatgaagcttgacttcaggctccgacagaggctgcagcttcccctccccaagctgagaacggccccctcagcctaccgcttcaccccactggcctcatttatttgggccttttccaccttctcccacatcaacagctgctccttaggaaaagatctaaaggtgtaaatgcagccttaaagcttccaccgagctcagaggtacctgcatttgaactggaaaccaagcctgaaagaatgaattggtagtgatggcatttcaggaagcagagatgtttctgtattggggggacggtccctgtgttcctcattcagtgggcacagtggcatctttgatatcgccttggctctgaattagacaaacagcccacatttgggagagtcggtcttgaccgcatagtttagtcttggcggctaatagtcaaaggattttgccttgacactgtcactcacctgggaggccagaggtggaaggctcacctggcagccgacaagccgaacggaatcatccttattacctaggcctctaggccagtactcattttgcctctgcctggaaatagagttcccttctcttcctctgcagagggactcatgggtgggaccatgacatttagttaaggccctttttcctccccacctctgcttgccctcatcaacatctggcctgcagtctgtaaacagttctcctctgagtcttaatgactcagtttctcccccacttcaccctcttctctacaaagtagt

SEQ ID NO: 42623 - DNA, 1774 bp, Artificial sequence
  DNA replication origin
aagccgcttccctggccatgtctttagagttcgctccccgccacccctcgggcgcccgccttctgtgcgacccttccccccacttcctggttgggctcctggatcccaggacgtacctgcagcagcagcttgacccgctcgatgggcgctaccgccgtcttggagatggctgcggccactccacctgccaggaagtccttggcgaaggacacagcggcatctgtcatgttgaaagaggaggcagactgctgcaggacgggactgggccgggaaccggctttgactccggcgctgcggggcggagcgaagcaaatggccgatttatatagggggagccggagctggagcggcaggcgtcggaggcggggccggggcggggtctgggccccggcgcgctgggcggcagagccgctgagtggcccagctcgcaggaggaggagtcgtggagggcgggccgggactgctctccgcgccgcccgtgctcgccctcggcacctgacccggcgagaggaaggggcgggtccagagaacacccgggacttgaacgctggaccctgagagaggcctcggagaggggaggaagggtgaggtcacgatgtgcctggacaaaaacccttggagcaggaccaggactagggtgagacgcatttgctacagggatgccaaaagaacccttcagtcatcgagataaacagtagtcaatgcgatactttaaaaaagtcgtatgggcaaactacatcctactggccggcccccttgttttgtaaataaagtttaattggagtgtcaaggctgggtttagggtgaggcaagcgagacaaggtcatgcaagtgcaggttgggatcctgtctgtatttcaaatgttgatcatttgttcatcatggatttttgcattgcttctgatttttttaaaatagtacatgaaaaatcatttgtcttaattactgagttgtttttcaccaaggtgaatgcctcactcttcccactctagaccgtgtgctgtcctggagccagtgaaaccagacgaaattaagggaacagcagacgaaggaactgccaccgtgccccagaccctggtttgcaaatacagttcgacaaagatcttgccaggaattggcctgggagagtccaaaggactgggctgggggtggggaaatgattttagccagaagacaaatatagaggttgtacccagaaggttaagaggcttaggaaggttaagaactacgttaacatttggctcccaggaccccaggtaaagtgcccttggattgaatagatttctgaactccagaaacatttagaggaatcaatagaattagattggcagccattgtgccaatggacaagtgcttactgagccccttaatcccttcactgggtaagcatttgccacacatgtcctcaaaaacctacttgttagcttaagtggactccctcaagttcagaacaggagcaaatagtgtaatcacaagttccgtgtctgaataatcataacaatgtttataaaaataaggacgactgttgaaaactgcaactgcagctgaaccttatgtgcccagacttcagaattcccataggcaaaatgccagcaggcctttgcacactgaacacatagtgttcatatccttcactttcctttcctgccctctcctatcttctccagatctgcctgtgaaaggacccaattctaggaccccccaggatggttaggcccttcctctgaaagtacactttgcaatttgttagtctcctcaagaaccccagcgatcg

SEQ ID NO: 42624 - DNA, 1049 bp, Artificial sequence
  DNA replication origin
caattaaactttatttacaaaacaagggggccggccagtaggatgtagtttgcccatacgacttttttaaagtatcgcattgactactgtttatctcgatgactgaagggttcttttggcatccctgtagcaaatgcgtctcaccctagtcctggtcctgctccaagggtttttgtccaggcacatcgtgacctcacccttcctcccctctccgaggcctctctcagggtccagcgttcaagtcccgggtgttctctggacccgccccttcctctcgccgggtcaggtgccgagggcgagcacgggcggcgcggagagcagtcccggcccgccctccacgactcctcctcctgcgagctgggccactcagcggctctgccgcccagcgcgccggggcccagaccccgccccggccccgcctccgacgcctgccgctccagctccggctccccctatataaatcggccatttgcttcgctccgccccgcagcgccggagtcaaagccggttcccggcccagtcccgtcctgcagcagtctgcctcctctttcaacatgacagatgccgctgtgtccttcgccaaggacttcctggcaggtggagtggccgcagccatctccaagacggcggtagcgcccatcgagcgggtcaagctgctgctgcaggtacgtcctgggatccaggagcccaaccaggaagtggggggaagggtcgcacagaaggcgggcgcccgaggggtggcggggagcgaactctaaagacatggccagggaagcggcttaggagaggccagagcggggcgcagaggcagaacagaagtcaaactggtgggaggcgcctttagtgacctgaagtagtgagtctaggaaggggccgggggcagagggcaggaccaggctctcggcatctccgaggcggcggactcggatggagcagtttctgagtgacggcctccccgggcctgggcgtcaagggcgaaggccgaaagccggcgttagaaagaggaacgccagttcttaccgaagacctcaaggtcgcggcaaggagat

SEQ ID NO: 42625 - DNA, 1637 bp, Artificial sequence
  DNA replication origin
agaggcagaacagaagtcaaactggtgggaggcgcctttagtgacctgaagtagtgagtctaggaaggggccgggggcagagggcaggaccaggctctcggcatctccgaggcggcggactcggatggagcagtttctgagtgacggcctccccgggcctgggcgtcaagggcgaaggccgaaagccggcgttagaaagaggaacgccagttcttaccgaagacctcaaggtcgcggcaaggagataactgcccgggggaggccatgcgcccgggtccagcggcctcccagcccgcggacgcgctcaaacctcgccgggccggaagccggcgccgggaagcgcgtgtgccttttacgtccgcccccgcgcagccgcggccgctgccgccgcgtctccgcctgcctccctgcgccgcgcgctctccagtgccggctctagagggcgctcctgggctagcgtgtagggctggcggcggcggcgctcgggtcacctctgggagcggagtgggggcggagcgagacggaagcagctcaggagacttgaggcgtaggctgcggtccccaaggtgaccgcgccctatgtgggactcgccctaatgcctctgaacctgggtttgaggtaatgacctttctcctaggtctgaaggtcacgggtccgctggaggatgccccctctccactcagaggggtggaggcttaatgctactggtgcagatcacctcttcccctgtgacagcctcagagggttgggagggtccagccagtatgatatacgaagactagatttgagagaggggagcctaccttaaagggcattgatcgagatggcataagctcttctctttcccttccccatggttataactgtccctgttggcttccttcctgtctgttaggtgcagcatgccagcaagcagatcactgcagataagcaatacaaaggcattatagactgcgtggtccgtattcccaaggagcagggagttctgtccttctggcgcggtaacctggccaatgtcatcagatacttccccacccaggctcttaacttcgccttcaaagataaatacaagcagatcttcctgggtggtgtggacaagagaacccagttttggctctactttgcagggaatctggcatcgggtggtgccgcaggggccacatccctgtgttttgtgtaccctcttgattttgcccgtacccgtctagcagctgatgtgggtaaagctggagctgaaagggaattccgaggcctcggtgactgcctggttaagatctacaaatctgatgggattaagggcctgtaccaaggctttaacgtgtctgtgcagggtattatcatctaccgagccgcctacttcggtatctatgacactgcaaagggtaagtttgctgtgggctttaacgttgtgttcttaggagacagtttaaaagagcattgtaccaacctaacagtccaagagctaaagagttgtttttttaattgctaaaggaagccaagatcatccaatgcaacccttgtgtacagatgacgtgtttaggggatgtggggaaaggaagtcagtaaaactctgctttttggtaaaagcatctctttcctattcccaggaatgcttccggatcccaagaacactcac

SEQ ID NO: 42626 - DNA, 1429 bp, Artificial sequence
  DNA replication origin
agcctggccaacatggcgaaaccccgtctctaccaaaaaatacaaaaattagccaggcgtggtgatggacacctgtagtcacagctactcaggagggtgaggcaggagaagcacttgaacccaggaggcggaggctgcaatgagccgagattgcaccactgcactccagcgtggacaatagagtgaggaaacaagaaaaaaagaaagaaagaaagaaagaaagagggggagagagagggagggagggaggaagggagggaggaaggaaggaaggaaggaaaagaaagaaaagaaagtgggagagggccaagtgtcctagaaatgaagggaagaggggatggccatcggagccacactcacatagaagtcaaataagacagggctgaaaaaggagaaccatttcagcagtgatggagaccgaagcaagatcacagtaggcctcttcaagaagcttagactgtgaaggggaggaaagaatgaaagctagaagtaggctctgtgtcaaaggtttttgttgaaggcattagttcaaatgtacatgctgaggaggagagatggagaaagaggggaaggttgaggcttcaggaaagagaggaggtaagtaatagagcaaagtccaaggggaagtgaggaggactgaactgaatacatgggggaggtgggtgtcagcctggggcaggaggagggagttaggggagggggagagggtggtgcaggttggatttgctgagcagactctgagatggagattagcatgcaggaggtttcttagggagtactcttgggatcatcacgcgtggaaaggaaggaatggaagcaggactggagaaaggagacattgggctgcaatgcagattcaacaaaggcctcagccagacctatgggaagctctgaagctaagagtggagacaagggggccaggcctttatatccccacatcagtcattcattggacacaggctgtcctgggaaggaggcatgcccttgggcaaagtgggtttcttcagctgaggctgtccccaaaggggtccaccagctgagggctctctactgttaggcactgagtctttctgttgtgaagatcagggaagcacattgcagtgtctcctatagagaggaagggggcgctattgcatttgagttgaatctgcagcccagttggtgtgaggctgaagttcacgctgttggcttcaattttgctccgtgaagatggaaaccaatctttctgatgaaaagggggctagctggggttgggggctagaggagagtgaaatgatgatgaaatggctgcttcaggacactgaagatgcgctgaccagggacatacaataggattgccaagcgatgttagggtcttagttgaaactaaaaaaatcattttagcaggcccaaacagtgtcgcgatttcaaggctctgtcattcttggtc

SEQ ID NO: 42627 - DNA, 1006 bp, Artificial sequence
  DNA replication origin
ctgtgggattgaatgcaggattgggcgctcaacgtttaggccaatgatcaccccagggcagaatgaaatagtgttgtatgtcctgtgggagggaatgggagcttaaggcaggcggagtagggttttgttttgttctgttttgttttgggcactcacaatttggctctggaaccacatttccccttggtagttcaacaagccaagcggctatttatgttcagaagagtccaagatatgagactatccgactgcagggagttgcaaggacagtgggtctgaagtaaaaggaacgtggaaaagctgcaggttgcaggaagagtcacagtccgtggacctgcaaaagcaataacagttttaaaggataatttttaaaggtcaacccaaaataacttagaagataggcataatacacatttaaaaattattgaaaataggagaaaggtagatttgggttaagtcatcaagagttttgaatgccaagctaatggattccttggaagtccattgagcagggaagtgacatcattagagctgtccttatcagagattggtctcaagagagcaggcaggagactcttgcagtatctaggtgcgagatactgaagcaggcagtgacaataaaggcgaggatatgaatgaatggggaggacttggcaacaggctgaatatggggcaagagagaggaaggagtcaacagtggctgaaactctaagccccgagataactggggttttgaaggtgccattaacagaattacagaatagagagagagggacaagtttggaaaaggaaattttgggtgggacttactgagttcatgggactggtgagacatccccgtgaagatgtccagaagatatcagatgtgcaggaatttgtttctaacatgagaagcaggaggcacttgacaatggtagtgattctagctgctgcttaacaacaggtactttcatggtcaaggatttctatctcccattaactccaacatatcagttaaggcaagtct

SEQ ID NO: 42628 - DNA, 1225 bp, Artificial sequence
  DNA replication origin
gcctcgggacccgccctgtgccccagctcgcaacccccggcctcggccgtcccctcggtttacctcttgaagtcccgcatgaggcgccgccgagccggggtggacatgtcgcgagcggggtcaggggtggggcatacactggggtctcgggttcccgcggcgggcgaggaggccgaagaggctggagaagcaggagaaggggaggcggaagcacccagaggaaccgcgctgcctctccgaagtcgagggtcggtctggcgccggctaagcaccaccccagtgtagacgggggctgaaccaacctgagagcagagagaggggggtggaacgtcgagcgccggacaggccgtaccaagacggggcggggggtgcgcgaggaaagttgcttatgtcattaaagccccacgggaggcccggggcggggccgcgagcgcagaggcgtagggtacgccggagccccgggcgctggaggagctcgtggtggaacggggtccatccccacctgctaattctaaggcaaaccctgggaagttttcggctttttttctttttctctttttttctttttctattcgtttttgtttgttttgtgaccagatcattcatgaaagcgcgcactatgcccggggaggagaggggagaagtttggaagtcccaaactagaggacgaaggagtgggcggaggtaaaaccggttctcaaaaagcggcaactctagggtgcacaaccccttcggacaccggagactggggtcggaggggtggggagaggagtgattggttaaaatcacggaaaatcaaaagaataaatcggccttgactatgacgggggggcggggcggggctgtgggattgaatgcaggattgggcgctcaacgtttaggccaatgatcaccccagggcagaatgaaatagtgttgtatgtcctgtgggagggaatgggagcttaaggcaggcggagtagggttttgttttgttctgttttgttttgggcactcacaatttggctctggaaccacatttccccttggtagttcaacaagccaagcggctatttatgttcagaagagtccaagatatgagactatccgactgcagggagttgcaaggacagtgggtctgaagtaaaaggaacgtggaaaagctgcaggttgcaggaagagtcacagtccgtggacctgcaaaagcaataacagttttaaaggataatttttaaaggtcaaccca

SEQ ID NO: 42629 - DNA, 1439 bp, Artificial sequence
  DNA replication origin
gctcgcgcgtgagtgcggcggaagcccttctgctcctccacgagttagaggagtgtaggggacgtgcatcccagtgtcgggacgcgagctcgtgctcctcttttcctcctaacggtggcccccacgcacacactccagtccccccgagagttgatcttctcccctcagcgcgcccctccttacccggcccctcccaccggccccccgtttccgcccgcttgctagctgcctagctcgcggtccgtagtcggcttcgtccctggggtccctgcttgggggcggagaagatggctggaggacgtctgctgttggggggcgacttcctgtcgcgccgccgctgccccccctcccgccgccgccgctgccgcccctcccgccgcccccgcccgagccagtgctggagcagtggcgctatagccacgaaagtgactggcagtgggctctgcggcgcagcttcatctgtcggcacctgcacagctatcccggggctgccctcgaccagctcctcgcgctctccgccgcctggaccaaccacgtcttcctgggctgcaggtgaggaaggtgtgggtgtcgggttagggacgggggtgagagatcggtgatgggggatcgggttagggacggcgctggagggatcgatgatggtggttgggatagggacgggggcgggatgcggaggataggttggaggctggagatttggaggtgctggagggcactagagggatcactattggcctgggggtggggtggccgactgtggtggctgggcatgacataacagctaggagggtgcagagatcgcggaagcggcctctccaggaccagggatggagatgaagcagcgcctagaagaggattattgagaggtggtcattgtagttggtggcggtattagaggacgtggggaatgatgaatagcagcatctcggacctgcgtagggccttccaaggatgcagtatccgcagagaatatattcgacagttggagttgtgggggaagggcgaggggaccccactgttctagtctcctcctgaccactctctttttccattcctcttaaatacccccctctacttgcagccccctagcagggtcttactgtcttctcctggggaggcggtacgtatcagctctctgagccgcagcagcgtcagccttgcttgtagatttgcgcataatgtgtctggactcaaacaaagaaatggatatatctactgtaaaaatggattgccctctttttaccctaaatgggatcagaaggattaacatttggctctgagtgaggttttaggtgtgtgtgtctgtggtgggggtgggggtgtgtgtgtgtttgtttttcccccctttcctagaacctggtgacgttttgaacaggcctctttgaaagctctttgcattcaatggagactgcagtatggttccaacgcagcgtgtt

SEQ ID NO: 42630 - DNA, 1212 bp, Artificial sequence
  DNA replication origin
acggatccgcagacccacgcactgcgcggagagcgataaaagaccccagcacgctctgctcccctcctctaggttctagcctacctacccgcgtgccgtccggggttgtgaggccagtgcgcttgcgccgcggctgttccctaacttccaaatcccgtcgcagaatctcgcgcgacgtacttttttccctccagtgacgactacgggcctttgacgcactacggtgacaagcggagggcggggactccagaaagggaatttaggaaggttctctgaggttcgagaatatggttagaaggtgccctcagatgaatgttggtagcccacggctcgtctgacgcttttccctggatttttaagcggcgcgacagtgagaccatgttccttgtaagggatttaggtctgcactggactttacattaaaacaaaacaaaacagtcagctccccgaggtgccttttcttcagagagtagcttgaaatgctctgtgcatcgtgcatcattagctttgtgtaatagcttactgcggaaacgtagtaaaaatgaaacacttgccaagaaaatcatccacagcgccgcttctcaagttagccagtttcaagtccatactgtatcccaattacgaacacagatactgtttacacagttctgatcacgattgcaagtctgtatttcacgtatcaacttaagtgcaaaagattacaagatacaaaaggggcccacagaagagggtactgcaaggtagagccgctcaatcactgtagccaaatgtatcactccacccggagtcagcttcactcaataacttcagtccctatctgccaacctgtgtcacgaaagcagttaatcaatgagtgtctgtcggcgggaatttacacagcacctactgtgtgctcaatacagcaagagtacaaaaaagaaggaaagaaagtgggttttctctgttgtcctggaattgactacaatcttggtggggagaaatagccctgcataaaactaaatgttccaccaggagccggaccattggatgaggtggctttaacacactaccatctttaactctttaatgacgtatttctaattatatgacactttatgttaggggtgtattagactgagaggagcagaagataacagcactttacacactttcataatttatttccacgtctgtctttctccgtggtgggcattcatgtttattggggtaaca

SEQ ID NO: 42631 - DNA, 795 bp, Artificial sequence
  DNA replication origin
cacggtgggacttctgctcccggggtcagcagctcagtccctcagcctgtcccggaaaacggtggtggcgcgcggggggcggggggcggcaggggggcaggcaaaacctgcgggccggcggctgaacttgcattgcccaagagccgcagtgagcgccaccgcctccctcgctgcagctgcggccccacggctggggcgttgccgaatgaatggccgtaggagccgccgagccctccgggtccctggcaccctggccttgccgcgcccctgcgcacggctgcccgttgtgacccgggaccgcacaggcaaagaggcgcggggctggggttagcctggggcagaaggcggtgagtggcgaggggggcggggaggtgactggctgggatagggtttctctatatgcattacatatgtgactgcgtctgtgtgtgtatcggtgtgcgcgtatgtgtgcacgcgcgcgcgctcgtgtcttcccgggcgggcggcggcggcgccggggttctgtctgtgacccaaagaagtccgcgtgtttctctgagtgtgctcacctctgtggtgtgtgtccgaacgcctctctgtctgcttgtgctgtgtgcctctgggtctcatttgtgcgtcagtgtggggtgcagttggctggcctgtaggtggctggctgcgtattttggcatgttttggagcgggcctctgaggatctgtctcgggtgcatgttcagtgtaactgggcttgtgtgccaaaacctgtggagctggcttctttctatggagactcaggaaaataagtgtgagact

SEQ ID NO: 42632 - DNA, 1530 bp, Artificial sequence
  DNA replication origin
ctgtaatttcgtggagccaagctcaccacctttgggtacctagtacagacggaacccacgcctcctctctccgacccagccctagacgctcagcaagaccacccaccccttctagtaccagaggaagggctggagatgaaggttctcagctctatggagcgaaatggaggggcgggtgacggggagcggcctccagtcactctgtcccgccccctgatttctccttgaccctcattcagcccgggacaaggcggccaatagggcgcagaggagagaacttccgaaggcaggggtgcgcccgcccgccctccttatccccgtggcccacctccgcgggtcctctctcgtgggcacctctccacttctccggccttggcgccctcccctctctcttgggactggcctcttgctagctccctgtcactggagcacgctggcagatttggcatgcccgaggccccagcgggagggacagtacattccactcctcaaaagggcaggttccctggtgtgggagagagacctgggcccgccagagggaccccagatgggggaggggatgacaaggctatggaggaaacccgggcccaagagggggccccaatggagcatggaagatgaccccgtaaaggcccaaggctggagcagctgaggaggaggcaggagagagggaaaaagaaaagaaggaaccagggagagagaggaagaagggactcgatccagaggccctggtctcggagaagtcagggaagacaagaaaatggagtagccaaagaagagcatgcctggcacttggttccacctgctggatggagcttctcacactctctcgggaagccctttatgtatgtaccctgtgcgcctggagaacaaggactcagcaaacgcatcccagggccgagtgcagggcctcgcagtcaggaggcactctattaagctgagggcagagaacttggatgcgtgcgaggggggcggggagaagaaagaagagacacagtgagggaatagcagtaaggacagtcatgaagagccaagtattcagggagcgccactgtgcgccttcattgtgctggagacccaggagcggcctaaagagaagagcctggcaaaatcagggatcagcgcagaggagctccgcgagacagaaggcgcaggccatagggcggatggcggtggcaaggaagaggggcagctggagtctttcagactctctggagctttggggcagggcctgagccctggactgggttggcagtgacacgggggaccagtgctatatctgaggaaccacggtgaggcttgggccccaaccgcatgggggcggggagtcagaggtgactggcggcttccaggctgggtgtctgggacagggctcttccctggcaaaggctagggcgtggtggactgaaaggccccgaggtcactagccccgatctggacttggggtttgggtggtggtgggacaaaaggggagaatttggaagccagagcagaaagctgctgccggaacgggaggggactggagggctg

SEQ ID NO: 42633 - DNA, 1384 bp, Artificial sequence
  DNA replication origin
actgctggggctgcagcgggcggctcctgcggggtggctgtcggaggagcgcgccgaggagctgggcgggccgagtgggccgggcagcagcaggctgtgcctggaaccgcgggagcacgcgtggattctggcagccgccgagggccgctatgaggtgctgcgggagctgctggaggctgagccggagctgctgctgcggggcgacccgatcaccggctactcggttctgcactggctggccaagcacgggcgccacgaggagctcattctggtacacgatttcgccctacgccgggggctgaggctcgacgtgagcgccccaggcagcggcggcctcacgcccctccacctggcggcccttcagggccacgacatggtcatcaaggtgctggtgggcgccctgggtgctgacgctacgcgccgcgaccacagcggccaccgggcctgccactacctgcggcccgacgcgccttggaggttgcgggagctgtcgggagccgaggaatgggagatggagagcggcagcgggtgcaccaacctgaacaacaacagcagtggcaccactgcgtggagggccgcgagcgcagtgggcgcgacggctgtggagacaagcaggagagtggcagcgtcgcggaccaaggcgaaggacaccgcgggcagccgggtggcgcaaatgcatagccttttccgccatctgttcccctcattccaggaccgttgacagggacagagactggagagctaggaggggctgtgacactgtggcgatggctaggtcctgggttgtcccgggttccaccgaaggagaggcgccttggacgctgcttgggcctgcaaggaacagaacacgtcggggtccgactcaggtacttgtctcaggtctcctgtaaccaccggcctggaggacccggggactcgggcaccacctcaccaagagagagtgaaggaccaagctggcctggctccgagttccaaagctacaggactaaggagttgggagcagggagcgtggtcctgcttgggagagggcaagttaagcttccaggggccatttctgggcaggccgacgcgctgggtttattaggaaacattcgctagaagaatgagttaagattgtaaaccaccaatgcagagaaaacgcctaactctgccggcctcgctcggccattaatgggtcttggggtgcgggtagagtcagcctctgacaacctcctcctgagacgacccagccttactggtactttttctcatgtatcacaggttacttcttatgtatattaaagtggaatatgtgttcttttcacatgacaaggctgtcctttcagtgttttcccccacctcccttactaaccacaaaggaagaaactgcatatgtttgcagggt

SEQ ID NO: 42634 - DNA, 1410 bp, Artificial sequence
  DNA replication origin
accccagaggccactggtgagaagaacatggtggtgaggacctgatgtgggaaggggagtgggattctttcttttttcttttttcgtttttttgttttgttttgttttgtttgagatggagtttcactctgtcacccaggctggagtgcagcggcgccatctcggctcactgcaacctcctcctcccgggttcaagcaattctcctgcctcagcctccctaatagctaagatcacaggtacacgccaccaagctcagctaattttttgtatttttagtagagacggggtttcaccatgttggccaggctggtctcgaactcgtgacctcaggtgatcctcccgcctcggccttccaaagtgctgggattacaggtgtgagccaccacgcccggccttattttaattttattttgagatggaatttcaatcttattgcctcagcctcttgagtggctgggattataggcgcccgccaccatgcccagctaattattgtatttttttgtggggacgggtttttgctatgtttcccaggctggtcttgaactcctgagttcaagggatccgccagcctcagccttccaaagtgccgggattacaggtgcgagctaccacgcagggccaggatttgtttttttcccctttgttttgtttacatttttcttttggtggggggaggggagagatagggtctcactctgtcacccaggctggagtgcagtggtgcgattacggttcactgcagcttccacctcctggactcaactgatcctcccgcctcagcctcccaagtagcagagaccacaagcacacaccactaaggtcagctaattttttgtagagactaggtctcactatgttacccaggctggtctcaaactcctgacctcaagcgatcctcctgcctcagcctcccaaagtgctaggattacaggcgtaagccaccccaacgggctgggagtaggattccttattgcctgcccagaggagacaaatgcaggcaaaatactttcgtggagggaacctggagagatttcccagcagattagaaaggctccttctttgaagcagaagcttaaattctgtggccagaactttacttcttacccccagccaagccccttactgaaacgcacaaattttggcttccagggctctctaggttgagaggccttttgaatcctcatgcagcgccgaggacaagttcttccaaactactccctgctcggatgctagtgcaggtatgagtggagaaaaatggcttggaagcagagatggaggggagagctgggaggagcaggtggggcagagcgggaggagctggctagagccttgccaagctcagcccctccctcttcgggaagaaaatagacttggctgcttgggaagccataactcccacccgactc

SEQ ID NO: 42635 - DNA, 1283 bp, Artificial sequence
  DNA replication origin
gtggatgggactgggtgctgtggagcaggaggcggcgctcgtcggggaggctcgggccgcacaggagcccacggtggaggggggctcaggcatggcaggctgcaggtcctgagccctgccccgcggggaggcagctgaggtcctgcgaaaattcgagaggtcctgcgaaaattcgagtgcagcgccggcgggccggcgctgctaggggacccggcgcaccctccacagctgctggcccgggtgctaagcccgtcactgcccggggccagtggcgctggccggccgctctgagtgcggggcaggttgagcccacgcccacccggaactcgcgctggcccgcaagcgccttacgcagccccggttcctgcccgcgcatctccctccacacctccaggcaagctgagggagccggctccagcctcggccagcccagaaaggggctcccacagtgcagtggcaggctgaagggctcctcaagcgtggccagagtgggcgccgaggccgaggaggcgccgagagggagcgaaggctgcaggggctgccagtacgctgtcacctctcactaccttgcatggatggtggagccatagtgattgggtgaccatcctggcctcactgcctgctgtgtgaccttggcttttctaataatgttctttgagtatttcagatttatctctgaggtgaaatgtgcttaatgaggcccctggaatcattctaagacccttgtccttagaaagaagctaatgatcctctcagtgtgtggctcggaggaagtgacaaaatcatgacttcctgacatgataaatggtccgctgttctgtggtccagctttcctttcaatgctcagttgctgggctgaaaagacaaccatattgactctagaatgtcagttacaatgtctgtcctcacaagggaagtcatgatcaaactgaaacaagcaaggtgttcccatgctagatgccagagacaggtttacccgtgggtgaatgatgcagttcttgtccatggtataggatgggatggtgtggtgtcaggggagggggcaagaggggcactggaagtaagagagtgggagaagaggaggggtccctgtcaaattcccctcaatcctgagagagacacttaggaacagagtgtctctgctccctctggatattcccgtgtatattttgaagcctgggaggcaggatggaggacatcctgctgatgcctgaaggatggcaaagcagaatagaaggatgctcccttaaccccatgaccgagcctctgaattaaccagctcc

SEQ ID NO: 42636 - DNA, 1117 bp, Artificial sequence
  DNA replication origin
cccccagctgaggtgtggggcttatttttacctggtatacactcaggcagtagaacacggtgtcgtggacgagcgaacgcgccatggctggagcgctgcgcccctgcacaaactccgtggcgtctgcagctggagtgggggttagagggtggagctagttcctgttctcatgcttggtattggttacagttgcaatgagtgggacttgcttatgcgcacaagcaagagagggaatggagaggagtggggggatgggaagttggggggtgcgggtggggagtgggggtgttgcaggtgggagtggggggttgtgagtgtggggtggggtgcaggtggggatgggggtgtgggtggagggtggggggtgcacagtgagggtgggggttgcgggtgagggtaggggttgtgggttggggtgggggttgccggtgggggtacatggtgggggtgggggtagcgggtggagatgggaggtgtgggtggagggtgcgtggtgggggtaggggttgtgggtgggggtgaggggtgtggtatgggtcgtgggtgggggtggcagttgagggtggagtggggtggccaaaacacaggggcagtgtggagaagaaaagggccaataggaggcatatatgtatgcaacatggggccccagcttgcagctttgctgactacaccctactcgggcctagttattaccctgaggaaagctgatttgggggctcagaggggaggtgagatctcacggtgaccataggacgccttgagtaaaagtttggagaatatctcatggcctgaccctccatatttggcagcatgcacagggcgcgggctattaattaagcagaaatgattgactgggggctgcttgttcagagttccagcaaaggcactgaaagcagagctgccatgctctcttcagtgctgggatcgggatcttggagatgggcatgcagagcattctgggtggtaagatgtgctctgcaagaaatctaacgcaccctttgagaaagtcaacacagaataaacacgaggctgaatctgttagcctgagactgaatatctttggctatgcaagagaaacctgtactcatggcaaaatggagtgctataaggacaagca

SEQ ID NO: 42637 - DNA, 1261 bp, Artificial sequence
  DNA replication origin
cttccggaccaccccggcctgcgctcggaagaggagggcgcctttggcttcagcgcttcgcccccgcgctgtgccctctgtcggcggcgtggggcagctgtagcagcgttggcggcaggaggcggcggccgcgtcgacgtcgacccagactggagcgacgtttaaagaaggggcagaatcgctggggagtgcggcttcttcttgttgggggactcccagccttccgcgcgtccggaggaggagaagcggcggcgccgggaagcaggtgaggacccggccccaatcagggagggggcgaaggagcgcgcttgccttctccgtccctgggccgcgcctgcgtttgcattcgcctcacttgaaccaggaagcggcagagtcggaggctcagctcctccggctctttctttgtgtgggccggggagcgaaggaggggacgagccgcgagggccgcggcgcggtccccttcgccgttaggggccgaggggctgccggtgccctgggtaggccccggggcttggggaatccatcacagagacccacttggcttttccctcgcccctctcgctgcttttttgtgcctcttttactcccctagcccctactttgatttagagcttttctgccaggcccatcctccccttccgtccccttcccggggcacaacaatgccgcctgcttcgcttcatcccccccccaacaccccaccctgccgttcgccaccttctactttccctggtaccccatattcctcccgccctcactctgctgtttgtacctccgtctgtatttgcaagaagcttgctttgcacgtgaattggggttaaaaacctcggttgcagctggcagggtccatatggggaagagggaggtggaggaagggagatgaggttcagctgccgcagggagccgcgtgtcggtttgtttcactccctcgcggatggcttttatctctttccaccgtcaccagctcctccgaactggccctcggtcaagggtttcacagtgatgtggaatggcttttccacagtcgaatcgcatatcttcggagtgggttcagaccgacttgtgctgtctctggggccaccctgagtgggaggagggggacacataaacgaaacgaaaccgagtcccagtgtcacctggacacgtacatttgacgcattcccatattggaagaacccgggagcaaatgacaaaaattgcgtgccgttttcagaaaacctgtctttccacttaatatcgacttctgtcgaaatgcccg

SEQ ID NO: 42638 - DNA, 843 bp, Artificial sequence
  DNA replication origin
ggagactcccctgtccaaactgtggaaacccagcgttagcactggactcaggaatttgccagtgccgtcggtctgcggacttcaaaaagtggaatgcgtggcgccggctccgcttctatctgggatttatgattcctttcccgcagtgtggagactgggctgggcgaagcccactcagctgtttgttgcgcagacctttcgagaaacacaagatcgctgagggcccctgggagcccaagaaagaaagctcttcatcttgttccccaacccacagagcagtgcgccaagtagcgactctttaagccctgggccaccaaccagcccactccccgaaggcagacgggcccggggcgctgtggcttgatttgcaggtggttaggtggttgtcgtccgcagcgggaatggacgctgcggaaccccagcactcttccactctgccctccctcgcgaagcgcaacagcttggcgtcggggagccagggctgcgttgttggcgccacagctggccaaggtaagcagtgcattcccacctctctgtctctctctctctcgctctcgctgtcgctctctctcgctctcgcgctctctctctctccctctccctctgtatgtgtgtgcgcgtggtgtgtgtgttggagaaagagtgcgcgcgcgcgagctgggagtaagggggagtctggtactgctgggctcgggattcggaccaagtccttggcctcatttgtaccccgttgtaaataactacgcccttaaaaatgaaaaagcaaattcttatactgaatatgcaaaaccattgaggatacggatctttccaccatccaggagataacactttctggggccc

SEQ ID NO: 42639 - DNA, 812 bp, Artificial sequence
  DNA replication origin
taggtggttgtcgtccgcagcgggaatggacgctgcggaaccccagcactcttccactctgccctccctcgcgaagcgcaacagcttggcgtcggggagccagggctgcgttgttggcgccacagctggccaaggtaagcagtgcattcccacctctctgtctctctctctctcgctctcgctgtcgctctctctcgctctcgcgctctctctctctccctctccctctgtatgtgtgtgcgcgtggtgtgtgtgttggagaaagagtgcgcgcgcgcgagctgggagtaagggggagtctggtactgctgggctcgggattcggaccaagtccttggcctcatttgtaccccgttgtaaataactacgcccttaaaaatgaaaaagcaaattcttatactgaatatgcaaaaccattgaggatacggatctttccaccatccaggagataacactttctggggcccctccggtgaacgagttttgttgacactgagtcttctgcgggcagtagggagattatatagggggttcgatcttctccctgccccctccactcgagatgttcccgcaaattcatcggagaagacctgagcagactgatggcaggaactgcgggacagagggattttgcagaatgtaaagtatgttggaaagagagaattcgatttgattgaagtgtatccgaggcgaattttaaaagattaggtgggatcatgattttacaatcccctcccgctctccagggctccaaattaatttctccgcccagtgaaatcacagggcttgggaaggtgcctaacagctgaggg

SEQ ID NO: 42640 - DNA, 1404 bp, Artificial sequence
  DNA replication origin
gaagggctgtgaaccaaaaagccagggcgtggtcgccccgcccaccggccgctacatcaccacccctctcgccgctttcaagcgcggagattggctgtaagcaagaaagagccccgcccctagtcttatgactcgcactgaagcgccgattcctggcttttgcaaggctgtggtcggtggtcatcagtgctcttgacccaggtccagcgagccttttccctggtgttgcagctgttgttgtaccgccgccgtcgccgccgtcgccgcctgctctgcggggtcatggtgtgcttccgcctcttcccggttccgggctcagggctcgttctggtctgcctagtcctgggtgagttgtcgggccctcccgattagtctgtccgcctgggcccggggcaccagttcaaagctacaacctgaaagactggtccgagggggagggggttgagaggctcagcagctaacactgggcggcggcggttggcccggggaggcaagcggtgacctagagaaggcctgaccgacggatggcggggaagaagggcccaggagagtaagaaggggccggtaacggggggtggacgccgagggagtaggctgggaggagtgaagcgtggagagggtcagcgtggaaagagtaacttggggaaaacactgaggagtgagcgtaggagggtggtacatgcagattttgggcgccagagacaattaggagagtcttggtttgctgagatcagggaagagttttgaagatggtggaaaaactatggggtgagataggaaattaagagagaagaccatgcctgcctggagtagcttgggagaagtgtgtgggtgggggacagatgggacagataggacagtagagcctgaggggcaggggcagtgacagggttgggcattttgaaggttggaatttgagactgtgaagaaaggatgattcaagagattaggagtgatgctgggtttgagtttggtagtcatagttttaagggcgaaggaacctaaggtagctggggcaatttccaggaaagaaaacttggacccaacctctggagactaaggggttcagggggaactttgatggggagtgcacatctgacttggaggtattgaggatgtcgattttctcccagttttgctacttcctcccagccagacgctgacaaaaaaatccccagacgtttcagttaggagggcctcccagatgtgaggttttgggggtggagtatttgagtttggtagactacctctttgccttcagagtttcttcttttctttcttccccatcacacagctagcctattacctcatattttgggggtgcagggagcaggtagacaaacttgctaaggattgggttgttaccagggcctaagaatggctggatggggccgggcgtggtgg

SEQ ID NO: 42641 - DNA, 1178 bp, Artificial sequence
  DNA replication origin
aggctaaagatggcgccatttccggtcacgcggcgccgagggaggggcggtgtcaacctcagggagtgggggtgagggaagcgctgcagccgcccggggggcgggggagctcgcgcgtgagggggcggctggaaaggggcggctaaagtgccccagacgctcgcgctagttcgctcctgctcccgctccccttcgcgatcccctttcctggcagcgccttccttccctggcccaccgggaactcccactccctccttaacggtcccgcgggaagcttcgcgccgcagcgcccttaccggaagtgactgggcagacacttttcatagcgcccagatcccgaagcccccaggtccgcaggacttgagtgggggggggaaggggggagggagaaattggggggaagaaaagtggataggaggagggggcgggccttcgagacaccttcggagctcctgattggagctttctgaaggcgagggggtggggggggtggcgggaggagcgggaaggagcctcgggggagggaaggtagtgacggcgaggggcggagtgagctagctgggaaaacggaggaggaggaagaggaggagagagggagggacggaataaaacgtaagggtccgggagaatagaaactttgaaagagatgaaagaataaggagtggttgcaaggctaggggagtaaccctaaatagaggaaaacataatcatgccattatgcccgctgctggagaggaatgtccctatgttaagataggaaaggagaagaaaacgagctaagataggaagaaaaggactttttaattcggtgccggtataaattgtttctcttttatctcaaggcaccacagacccaaggctgaataaggcctgaattttgatgcctttctctttcatgtagctgtaaatccttttatcttactaccaggagcattttctaagctggctggccaaattaagtgtgtattctaaggcgaagaaatggaaaggtaactaacccctcacccacccagcactatgcccaggatcgtcctaacccccactctatcagtccttaactcagtaatttatagacccaacaaagctaagacccacttccttcttttgccaaatctcagtttacacgctgtcccaaaggagacattttagaaccatatcggcaaaagtcagtgttttct

SEQ ID NO: 42642 - DNA, 1697 bp, Artificial sequence
  DNA replication origin
ggcctcggggaggaggagggtgagcaggcggcaggcctggccgcagtcccccagggcgggagcgccgaggaggactcagatatcgggcccgcgacggaggaagaggaggaggaggaagaggggaacgaggcggccaacttcgacttggcggtggccacccgtcggtacccggcggcgggcattggcttcgtgttcctgtacctggtccactcccttctccgccgcctctatcacaacgaccacatccagatagcgaaccgtcacctcagccgcctgatggtggggccccacgctgctgtgcccaacctctgggacaaccctcccctgctgctgctgtcccagaggctgggtgcaggggctgcagccccagaaggcgagggcctcggcctgatccaggaggctgcgtcggtccaggaggccgcgtcggtcccagagcctgcagtgccagctgacctggccgagatggccagggagcccgcggaggaggccgcagatgagaaacccccagaggaggccgcagaggagaagctcacagaggaggccacagaggaaccggccgcagaggaaccgacctcagaggaggccgtggcccccgagggtaagggggctagcggcagcagcggggaagcggggatccatgtgtccaagggctctgggcagggctgcggtgcgggcacagctggtgaagcgggtggtgaaggggggtcggggcctcgggtggtgaagcaggtgttggggccctcctgaaacttaaggctgaatgtgtcccagtgagtcgaagcccaattctctaatgacatctatggttttgagaaaacttgccgccctctaccaacctatatttgataggagatctgagatcatcgatgccatttgcgagcctgcagatgaatggccaggtagataggggttcaggagggagctccgcaggaaacagaaggaaaagaacaggcaaatgggaggcaggcgtgctttttggttcatggcttttcaaagtgtaaagattcgtagaaagttgatcccccaaatgatgaagtgatacaggagcacttggtaaaaatgaaacattcagggggtgaggaaccaatgagcttcaccatagaatttgtcttttgaggtaaacaaatattttcccaacaaagttctgaccaaaacaccatagaatgagatcagacccgatgattcagatctcttcttctccaaagaactagaaataatcagccgctttgggtgggagatttactggaaaaaagggaaatacagtgtccctgtggaaatgatcaagcagcagcaacgtgagggccatggaactgttgtgaaaaccagtaggaaggtgcccagctattcctttcttacttaactctatcctgcttctcctgagggtggagtaactgaatgccgctgctagttataaattgggctatattttctgtgaatgtctggtccccatgtgtgtattattcttccctaaagaagtcactaaatctcagcccgaaaagtgggatgaagaggcccaagatgctgcaggcgaggaagagaaagaacaagaaaaagagaaggatgtggaaaacaaggtgaagaactccaaagggacctagacgcagcagaggtgaagccaagaaaatccaggtatctgtgtatagctttgagaatcagtcaactattcctggcatttacctgttgcagacagttttatt

SEQ ID NO: 42643 - DNA, 1114 bp, Artificial sequence
  DNA replication origin
gcgacgtggtgcctgcggccgaggtggtcggagtcgcagggcccgtggaaggcctcggggaggaggagggtgagcaggcggcaggcctggccgcagtcccccggggcgggagcgccgaggaggactcagatatcgggcccgcgacggaggaagaggaggaggaagaggggaacgaggcggccaacttcgacttggcggtggtcgcccgtcgctacccggcgtcgggcattcacttcgtgctcctggacatggtccactcccttctccaccgcctctctcacaacgaccacatcctcatagagaaccgtcaactcagccgcctgatggtggggccacacgctgctgcgcgcaacctctggggcaacctccccccgctgctgctgccccagaggctgggtgcaggggccgcagcccgggcgggcgagggcctgggcctgatccaggaggccgcatcggtcccagagcctgcagtgccagctgacctggccgagatggccagggagcccgcggaggaggccgcagaggagaagctctcagaggaggccacagaggaaccagacgcagaggaaccggccacagaagaaccgaccgcacaggaggccacggccccagagggtaaggaacgggctagcggcagcagcggggaggcggggacccgtgtgtcccagggttctaggcagggccgcggtgcgggcatagctggtgaagcgggtggtgaaggggggtcggggcctcgggtggtgaagcaggagtcggggccctcctgaaacttaaggcagaatgtgtcccaatgagtcgaagcccaattctctaacgacatctgtggttttgagaaaacttgtcgccctctaccaacctatatttgataggagatctgagatcatcggtgccatttgtgagcccgcagatgaatggccgggtagataggggttcaggagggagctccgcaggaaacagaagggatgcgccaaggaaaagaacaggcaaatggcaggcatcccttttagttcatggcttttcaaagtgtaaagattcgtagaaagttgatcccccaaatgatgaagtgatgcaggagcacttggtaaaaatgaagcattcgggggggtgaggaacc

SEQ ID NO: 42644 - DNA, 1185 bp, Artificial sequence
  DNA replication origin
ccccgacagcagcgacgtggtgcctgcggccgaggtggtcggagtcgcagggcccgtggaaggcctcggggaggaggagggtgagcaggcggcaggcctggccgcagtcccccggggcgggagcgccgaggaggactcagatatcgggcccgcgacggaggaagaggaggaggaagaggggaacgaggcggccaacttcgacttggcggtggtcgcccgtcgctacccggcgtcgggcattcacttcgtgctcctggacatggtccactcccttctccaccgcctctctcacaacgaccacatcctcatagagaaccgtcaactcagccgcctgatggtggggccacacgctgctgcgcgcaacctctggggcaacctccccccgctgctgctgccccagaggctgggtgcaggggccgcagcccgggcgggcgagggcctgggcctgatccaggaggccgcatcggtcccagagcctgcagtgccagctgacctggccgagatggccagggagcccgcggaggaggccgcagaggagaagctctcagaggaggccacagaggaaccagacgcagaggaaccggccacagaagaaccgaccgcacaggaggccacggccccagagggtaaggaacgggctagcggcagcagcggggaggcggggacccgtgtgtcccagggttctaggcagggccgcggtgcgggcatagctggtgaagcgggtggtgaaggggggtcggggcctcgggtggtgaagcaggagtcggggccctcctgaaacttaaggcagaatgtgtcccaatgagtcgaagcccaattctctaacgacatctgtggttttgagaaaacttgtcgccctctaccaacctatatttgataggagatctgagatcatcggtgccatttgtgagcccgcagatgaatggccgggtagataggggttcaggagggagctccgcaggaaacagaagggatgcgccaaggaaaagaacaggcaaatggcaggcatcccttttagttcatggcttttcaaagtgtaaagattcgtagaaagttgatcccccaaatgatgaagtgatgcaggagcacttggtaaaaatgaagcattcgggggggtgaggaaccaatgagcttcaccatagaatttgtcttttgaggtaaacaaatattttcccaacaaagttc

SEQ ID NO: 42645 - DNA, 1118 bp, Artificial sequence
  DNA replication origin
gcgacgtggtgcctgcggccgaggtggtcggagtcgcagggcccgtggaaggcctcggggaggaggagggtgagcaggcggcaggcctggccgcagtcccccggggcgggagcgccgaggaggactcagatatcgggcccgcgacggaggaagaggaggaggaagaggggaacgaggcggccaacttcgacttggcggtggtcgcccgtcgctacccggcgtcgggcattcacttcgtgctcctggacatggtccactcccttctccaccgcctctctcacaacgaccacatcctcatagagaaccgtcaactcagccgcctgatggtggggccacacgctgctgcgcgcaacctctggggcaacctccccccgctgctgctgccccagaggctgggtgcaggggccgcagcccgggcgggcgagggcctgggcctgatccaggaggccgcatcggtcccagagcctgcagtgccagctgacctggccgagatggccagggagcccgcggaggaggccgcagaggagaagctctcagaggaggccacagaggaaccagacgcagaggaaccggccacagaagaaccgaccgcacaggaggccacggccccagagggtaaggaacgggctagcggcagcagcggggaggcggggacccgtgtgtcccagggttctaggcagggccgcggtgcgggcatagctggtgaagcgggtggtgaaggggggtcggggcctcgggtggtgaagcaggagtcggggccctcctgaaacttaaggcagaatgtgtcccaatgagtcgaagcccaattctctaacgacatctgtggttttgagaaaacttgtcgccctctaccaacctatatttgataggagatctgagatcatcggtgccatttgtgagcccgcagatgaatggccgggtagataggggttcaggagggagctccgcaggaaacagaagggatgcgccaaggaaaagaacaggcaaatggcaggcatcccttttagttcatggcttttcaaagtgtaaagattcgtagaaagttgatcccccaaatgatgaagtgatgcaggagcacttggtaaaaatgaagcattcgggggggtgaggaaccaatg

SEQ ID NO: 42646 - DNA, 1727 bp, Artificial sequence
  DNA replication origin
taaccaggagggcggcgactccggccccgacagcagcgacgtggtgcctgcggccgaggtggtcggagtcgcagggcccgtggaaggcctcggggaggaggagggtgagcaggcggcaggcctggccgcagtcccccggggcgggagcgccgaggaggactcagatatcgggcccgcgacggaggaagaggaggaggaagaggggaacgaggcggccaacttcgacttggcggtggtcgcccgtcgctacccggcgtcgggcattcacttcgtgctcctggacatggtccactcccttctccaccgcctctctcacaacgaccacatcctcatagagaaccgtcaactcagccgcctgatggtggggccacacgctgctgcgcgcaacctctggggcaacctccccccgctgctgctgccccagaggctgggtgcaggggccgcagcccgggcgggcgagggcctgggcctgatccaggaggccgcatcggtcccagagcctgcagtgccagctgacctggccgagatggccagggagcccgcggaggaggccgcagaggagaagctctcagaggaggccacagaggaaccagacgcagaggaaccggccacagaagaaccgaccgcacaggaggccacggccccagagggtaaggaacgggctagcggcagcagcggggaggcggggacccgtgtgtcccagggttctaggcagggccgcggtgcgggcatagctggtgaagcgggtggtgaaggggggtcggggcctcgggtggtgaagcaggagtcggggccctcctgaaacttaaggcagaatgtgtcccaatgagtcgaagcccaattctctaacgacatctgtggttttgagaaaacttgtcgccctctaccaacctatatttgataggagatctgagatcatcggtgccatttgtgagcccgcagatgaatggccgggtagataggggttcaggagggagctccgcaggaaacagaagggatgcgccaaggaaaagaacaggcaaatggcaggcatcccttttagttcatggcttttcaaagtgtaaagattcgtagaaagttgatcccccaaatgatgaagtgatgcaggagcacttggtaaaaatgaagcattcgggggggtgaggaaccaatgagcttcaccatagaatttgtcttttgaggtaaacaaatattttcccaacaaagttctgaccaaaacaccgtagaatgagatcggacccgatgattcagatctcttcttctccaaagaactagaaataatcagccgctttgggtgggagatttactggaaaaaagggaaatacagtgtccctgtggaaatgatcaagcagcagcaacgtgagggccatggaactgttgtgaaaaccagtaggaaggtgcccagctattcctttcttacttaactctatcctgcttctcctgagggtggagtagctgaatgccgctgctagttataaattgggctatattttctgtgaatgtctggtccccatgtgtgtattattcttccctaaagaagtcactaaatctcagcccgaaaagtgggatgaagaggcccaagatgctgcaggcgaggaagagaaagaacaagaaaaagagaaggatgcggaaaacaaggtgaagaactccaaagggacctagacgcagcagaggtgaagccaagaaaatccaggtatctgtgtatagctttgagaatcactcaacta

SEQ ID NO: 42647 - DNA, 1712 bp, Artificial sequence
  DNA replication origin
gcgacgtggtgcctgcggccgaggtggtcggagtcgcagggcccgtggaaggcctcggggaggaggagggtgagcaggcggcaggcctggccgcagtcccccggggcgggagcgccgaggaggactcagatatcgggcccgcgacggaggaagaggaggaggaagaggggaacgaggcggccaacttcgacttggcggtggtcgcccgtcgctacccggcgtcgggcattcacttcgtgctcctggacatggtccactcccttctccaccgcctctctcacaacgaccacatcctcatagagaaccgtcaactcagccgcctgatggtggggccacacgctgctgcgcgcaacctctggggcaacctccccccgctgctgctgccccagaggctgggtgcaggggccgcagcccgggcgggcgagggcctgggcctgatccaggaggccgcatcggtcccagagcctgcagtgccagctgacctggccgagatggccagggagcccgcggaggaggccgcagaggagaagctctcagaggaggccacagaggaaccagacgcagaggaaccggccacagaagaaccgaccgcacaggaggccacggccccagagggtaaggaacgggctagcggcagcagcggggaggcggggacccgtgtgtcccagggttctaggcagggccgcggtgcgggcatagctggtgaagcgggtggtgaaggggggtcggggcctcgggtggtgaagcaggagtcggggccctcctgaaacttaaggcagaatgtgtcccaatgagtcgaagcccaattctctaacgacatctgtggttttgagaaaacttgtcgccctctaccaacctatatttgataggagatctgagatcatcggtgccatttgtgagcccgcagatgaatggccgggtagataggggttcaggagggagctccgcaggaaacagaagggatgcgccaaggaaaagaacaggcaaatggcaggcatcccttttagttcatggcttttcaaagtgtaaagattcgtagaaagttgatcccccaaatgatgaagtgatgcaggagcacttggtaaaaatgaagcattcgggggggtgaggaaccaatgagcttcaccatagaatttgtcttttgaggtaaacaaatattttcccaacaaagttctgaccaaaacaccgtagaatgagatcggacccgatgattcagatctcttcttctccaaagaactagaaataatcagccgctttgggtgggagatttactggaaaaaagggaaatacagtgtccctgtggaaatgatcaagcagcagcaacgtgagggccatggaactgttgtgaaaaccagtaggaaggtgcccagctattcctttcttacttaactctatcctgcttctcctgagggtggagtagctgaatgccgctgctagttataaattgggctatattttctgtgaatgtctggtccccatgtgtgtattattcttccctaaagaagtcactaaatctcagcccgaaaagtgggatgaagaggcccaagatgctgcaggcgaggaagagaaagaacaagaaaaagagaaggatgcggaaaacaaggtgaagaactccaaagggacctagacgcagcagaggtgaagccaagaaaatccaggtatctgtgtatagctttgagaatcactcaactattcctggcatttacctgttg

SEQ ID NO: 42648 - DNA, 1256 bp, Artificial sequence
  DNA replication origin
ctgcggccgaggtggtcggagtcgcagggcccgtggaaggcctcggggaggaggagggtgagcaggcggcaggcctggccgcagtcccccggggcgggagcgccgaggaggactcagatatcgggcccgcgacggaggaagaggaggaggaagaggggaacgaggcggccaacttcgacttggcggtggtcgcccgtcgctacccggcgtcgggcattcacttcgtgctcctggacatggtccactcccttctccaccgcctctctcacaacgaccacatcctcatagagaaccgtcaactcagccgcctgatggtggggccacacgctgctgcgcgcaacctctggggcaacctccccccgctgctgctgccccagaggctgggtgcaggggccgcagcccgggcgggcgagggcctgggcctgatccaggaggccgcatcggtcccagagcctgcagtgccagctgacctggccgagatggccagggagcccgcggaggaggccgcagaggagaagctctcagaggaggccacagaggaaccagacgcagaggaaccagccacagaagaaccgaccgcacaggaggccacggccccagagggtaaggaacgggctagcggcagcagcggggaggcggggacccgtgtgtcccagggttctaggcagggccgcggtgcgggcatagctggtgaagcgggtggtgaaggggggtcggggcctcgggtggtgaagcaggagtcggggccctcctgaaacttaaggcagaatgtgtcccaatgagtcgaagcccaattctctaacgacatctgtggttttgagaaaacttgtcgccctctaccaacctatatttgataggagatctgagatcatcggtgccatttgtgagcccgcagatgaatggccgggtagataggggttcaggagggagctccgcaggaaacagaagggatgcgccaaggaaaagaacaggcaaatggcaggcatcccttttagttcatggcttttcaaagtgtaaagattcgtagaaagttgatcccccaaatgatgaagtgatgcaggagcacttggtaaaaatgaagcattcaggggggtgaggaaccaatgagcttcaccatagaatttgtcttttgaggtaaacaaatattttcccaacaaagttctgaccaaaacaccgtagaatgagatcggacccgatgattcagatctcttcttctccaaagaactagaaataatcagccgctttgggtgggagat

SEQ ID NO: 42649 - DNA, 1710 bp, Artificial sequence
  DNA replication origin
aggagggcggcgactccggccccgacagcagcgacgtggtgcctgcggccgaggtggtcggagtcgcagggcccgtggaaggcctcggggaggaggagggtgagcaggcggcaggcctggccgcagtcccccggggcgggagcgccgaggaggactcagatatcgggcccgcgacggaggaagaggaggaggaagaggggaacgaggcggccaacttcgacttggcggtggtcgcccgtcgctacccggcgtcgggcattcacttcgtgctcctggacatggtccactcccttctccaccgcctctctcacaacgaccacatcctcatagagaaccgtcaactcagccgcctgatggtggggccacacgctgctgcgcgcaacctctggggcaacctccccccgctgctgctgccccagaggctgggtgcaggggccgcagcccgggcgggcgagggcctgggcctgatccaggaggccgcatcggtcccagagcctgcagtgccagctgacctggccgagatggccagggagcccgcggaggaggccgcagaggagaagctctcagaggaggccacagaggaaccagacgcagaggaaccggccacagaagaaccgaccgcacaggaggccacggccccagagggtaaggaacgggctagcggcagcagcggggaggcggggacccgtgtgtcccagggttctaggcagggccgcggtgcgggcatagctggtgaagcgggtggtgaaggggggtcggggcctcgggtggtgaagcaggagtcggggccctcctgaaacttaaggcagaatgtgtcccaatgagtcgaagcccaattctctaacgacatctgtggttttgagaaaacttgtcgccctctaccaacctatatttgataggagatctgagatcatcggtgccatttgtgagcccgcagatgaatggccgggtagataggggttcaggagggagctccgcaggaaacagaagggatgcgccaaggaaaagaacaggcaaatggcaggcatcccttttagttcatggcttttcaaagtgtaaagattcgtagaaagttgatcccccaaatgatgaagtgatgcaggagcacttggtaaaaatgaagcattcaggggggtgaggaaccaatgagcttcaccatagaatttgtcttttgaggtaaacaaatattttcccaacaaagttctgaccaaaacaccgtagaatgagatcggacccgatgattcagatctcttcttctccaaagaactagaaataatcagccgctttgggtgggagatttactggaaaaaagggaaatacagtgtccctgtggaaatgatcaagcagcagcaacgtgagggccatggaactgttgtgaaaaccagtaggaaggtgcccagctattcctttcttacttaactctatcctgcttctcctgagggtggagtagctgaatgccgctgctagttataaattgggctatattttctgtgaatgtctggtccccatgtgtgtattattcttccctaaagaagtcactaaatctcagcccgaaaagtgggatgaagaggcccaagatgctgcaggcgaggaagagaaagaacaagaaaaagagaaggatgcggaaaacaaggtgaagaactccaaagggacctagacgcagcagaggtgaagccaagaaaatccaggtatctgtgtatagctttgaga

SEQ ID NO: 42650 - DNA, 1183 bp, Artificial sequence
  DNA replication origin
gactccggccccgacagcagcgacgtggtgcctgcggccgaggtggtcggagtcgcagggcccgtggaaggcctcggggaggaggagggtgagcaggcggcaggcctggccgcagtcccccggggcgggagcgccgaggaggactcagatatcgggcccgcgacggaggaagaggaggaggaagaggggaacgaggcggccaacttcgacttggcggtggtcgcccgtcgctacccggcgtcgggcattcacttcgtgctcctggacatggtccactcccttctccaccgcctctctcacaacgaccacatcctcatagagaaccgtcaactcagccgcctgatggtggggccacacgctgctgcgcgcaacctctggggcaacctccccccgctgctgctgccccagaggctgggtgcaggggccgcagcccgggcgggcgagggcctgggcctgatccaggaggccgcatcggtcccagagcctgcagtgccagctgacctggccgagatggccagggagcccgcggaggaggccgcagaggagaagctctcagaggaggccacagaggaaccagacgcagaggaaccggccacagaagaaccgaccgcacaggaggccacggccccagagggtaaggaacgggctagcggcagcagcggggaggcggggacccgtgtgtcccagggttctaggcagggccgcggtgcgggcatagctggtgaagcgggtggtgaaggggggtcggggcctcgggtggtgaagcaggagtcggggccctcctgaaacttaaggcagaatgtgtcccaatgagtcgaagcccaattctctaacgacatctgtggttttgagaaaacttgtcgccctctaccaacctatatttgataggagatctgagatcatcggtgccatttgtgagcccgcagatgaatggccgggtagataggggttcaggagggagctccgcaggaaacagaagggatgcgccaaggaaaagaacaggcaaatggcaggcatcccttttagttcatggcttttcaaagtgtaaagattcgtagaaagttgatcccccaaatgatgaagtgatgcaggagcacttggtaaaaatgaagcattcaggggggtgaggaaccaatgagcttcaccatagaatttgtcttttgaggtaaacaaatattttccc

SEQ ID NO: 42651 - DNA, 1703 bp, Artificial sequence
  DNA replication origin
aggagggcggcgactccggccccgacagcagcgacgtggtgcctgcggccgaggtggtcggagtcgcagggcccgtggaaggcctcggggaggaggagggtgagcaggcggcaggcctggccgcagtcccccggggcgggagcgccgaggaggactcagatatcgggcccgcgacggaggaagaggaggaggaagaggggaacgaggcggccaacttcgacttggcggtggtcgcccgtcgctacccggcgtcgggcattcacttcgtgctcctggacatggtccactcccttctccaccgcctctctcacaacgaccacatcctcatagagaaccgtcaactcagccgcctgatggtggggccacacgctgctgcgcgcaacctctggggcaacctccccccgctgctgctgccccagaggctgggtgcaggggccgcagcccgggcgggcgagggcctgggcctgatccaggaggccgcatcggtcccagagcctgcagtgccagctgacctggccgagatggccagggagcccgcggaggaggccgcagaggagaagctctcagaggaggccacagaggaaccagacgcagaggaaccggccacagaagaaccgaccgcacaggaggccacggccccagagggtaaggaacgggctagcggcagcagcggggaggcggggacccgtgtgtcccagggttctaggcagggccgcggtgcgggcatagctggtgaagcgggtggtgaaggggggtcggggcctcgggtggtgaagcaggagtcggggccctcctgaaacttaaggcagaatgtgtcccaatgagtcgaagcccaattctctaacgacatctgtggttttgagaaaacttgtcgccctctaccaacctatatttgataggagatctgagatcatcggtgccatttgtgagcccgcagatgaatggccgggtagataggggttcaggagggagctccgcaggaaacagaagggatgcgccaaggaaaagaacaggcaaatggcaggcatcccttttagttcatggcttttcaaagtgtaaagattcgtagaaagttgatcccccaaatgatgaagtgatgcaggagcacttggtaaaaatgaagcattcaggggggtgaggaaccaatgagcttcaccatagaatttgtcttttgaggtaaacaaatattttcccaacaaagttctgaccaaaacaccgtagaatgagatcggacccgatgattcagatctcttcttctccaaagaactagaaataatcagccgctttgggtgggagatttactggaaaaaagggaaatacagtgtccctgtggaaatgatcaagcagcagcaacgtgagggccatggaactgttgtgaaaaccagtaggaaggtgcccagctattcctttcttacttaactctatcctgcttctcctgagggtggagtagctgaatgccgctgctagttataaattgggctatattttctgtgaatgtctggtccccatgtgtgtattattcttccctaaagaagtcactaaatctcagcccgaaaagtgggatgaagaggcccaagatgctgcaggcgaggaagagaaagaacaagaaaaagagaaggatgcggaaaacaaggtgaagaactccaaagggacctagacgcagcagaggtgaagccaagaaaatccaggtatctgtgtatagc

SEQ ID NO: 42652 - DNA, 1224 bp, Artificial sequence
  DNA replication origin
acagcagcgacgtggtgcctgcggccgaggtggtcggagtcgcagggcccgtggaaggcctcggggaggaggagggtgagcaggcggcaggcctggccgcagtcccccggggcgggagcgccgaggaggactcagatatcgggcccgcgacggaggaagaggaggaggaagaggggaacgaggcggccaacttcgacttggcggtggtcgcccgtcgctacccggcgtcgggcattcacttcgtgctcctggacatggtccactcccttctccaccgcctctctcacaacgaccacatcctcatagagaaccgtcaactcagccgcctgatggtggggccacacgctgctgcgcgcaacctctggggcaacctccccccgctgctgctgccccagaggctgggtgcaggggccgcagcccgggcgggcgagggcctgggcctgatccaggaggccgcatcggtcccagagcctgcagtgccagctgacctggccgagatggccagggagcccgcggaggaggccgcagaggagaagctctcagaggaggccacagaggaaccagacgcagaggaaccggccacagaagaaccgaccgcacaggaggccacggccccagagggtaaggaacgggctagcggcagcagcggggaggcggggacccgtgtgtcccagggttctaggcagggccgcggtgcgggcatagctggtgaagcgggtggtgaaggggggtcggggcctcgggtggtgaagcaggagtcggggccctcctgaaacttaaggcagaatgtgtcccaatgagtcgaagcccaattctctaacgacatctgtggttttgagaaaacttgtcgccctctaccaacctatatttgataggagatctgagatcatcggtgccatttgtgagcccgcagatgaatggccgggtagataggggttcaggagggagctccgcaggaaacagaagggatgcgccaaggaaaagaacaggcaaatggcaggcatcccttttagttcatggcttttcaaagtgtaaagattcgtagaaagttgatcccccaaatgatgaagtgatgcaggagcacttggtaaaaatgaagcattcaggggggtgaggaaccaatgagcttcaccatagaatttgtcttttgaggtaaacaaatattttcccaacaaagttctgaccaaaacaccgtagaatgagatcggacccgatgattcagat

SEQ ID NO: 42653 - DNA, 1113 bp, Artificial sequence
  DNA replication origin
tattaaacattagaagtatagaacaaacaggccagccaggcccggcgaggccgcggcgggtccggcgccccggacctccggacccggaggtccggcgccctggttggcgccctgcccccaaagtccgtcctccccgttaggtggcgcccaaggggaggggacagccgggcaggcaggaagctgcggcttaaaagggcaacccgcgccggacccttccttcctagtcgcggggagtctgagaaagcgcacctgttccgcgaccgtcacgcacccctcctccgcctgccgcgatgtaccgctacctggccaaagcgctgctgccgtcccgggccgggcccgctgccctgggctccgcggccaaccactcggccgcgttgctgggccggggccgcggacagcccgccgccgcctcgcagccggggctcgcattggccgcccggcgccactacagcgagttggtggccgaccgcgaggacgaccccaacttcttcaagatggtggagggcttcttcgatcgcggcgccagcatcgtggaggacaagttggtgaaggacctgaggacccaggaaagcgaggagcagaagcggaaccgggtgcgcggcatcctgcggatcatcaagccctgcaaccatgtgctgagtctctccttccccatccggcgcgacgacggctcctgggaggtcatcgaaggctaccgggcccagcacagccagcaccgcacgccctgcaagggaggtatccgttacagcactgatgtgagtgtagatgaagtaaaagctttggcttctctgatgacatacaagtgtgcagtggttgatgtgccgtttgggggtgctaaagctggtgttaagatcaatcccaagaactataccgaaaatgaattggaaaagatcacaaggaggttcaccatggagctagcaaagaagggctttattggtcctggcgttgatgtgcctgctccagacatgaacacaggtgagcgggagatgtcctggattgctgatacctatgccagcaccatagggcactatgatattaatgcacacgcctgtgttactggtaaacccatcagccaagggggaatccatggacgcatctctgctactggccgtg

SEQ ID NO: 42654 - DNA, 1693 bp, Artificial sequence
  DNA replication origin
tttgtctcacagtggaggcaacgaattgtaactcagaaatacattgctacttggctgcctctactctattattgtacaccttgaaggcaaggttaagtcctgttgtgggtttgagggccggaatttaatttttggagttttatttaatgtcaggagcggattgggtaataaaatgtatattgagaataagacggccttttgaccttttagggtctagggctgtaaagcatctcagggttgctgctgaatgagccatgaactggactgggtttttcatatttgatgaaagagcctaaacgctaattgacttgggagaggtcgaataaagaaggagcattaaccttgactgtgcctttagctccagccacctttttaagaggaaattgctgggcaggtgggggagggctagtcgtggaatgaaactgtaagccagaccaggtgtgaggaggggaggtgataaaaggattatagggtgggggagcagaggctgaggaagaattgggacctggctcagcctggcgaggagcagcctggggaggaggggaggggtcagatgggtctgtagaaaaggaagactagaaagactcagcaacgcttggggttgggactgaggggacaggcgggagggaaagaaggaggatttgggatgagtcacattggggacagagactagggagggaacaatgtgtaaaagaatgcctggatgttaggcacctcagaccgtttgcccattttacgacaagaattacctagatcttgtagggtggaaaaatcgaaagtgccattttctggctatttggaaccactgtcaagtttgtattggggtcaagcggcattgtagaagaaaataaggcatttaggttttaggtcaggtgtgagttgaagaggttttaaattcttgagaacacaggctaagggagaaggaggaggaatggagggtggaaggctgcccatagtgaaggaggcaagcctagaggaaagagagagtagagagacggagagaaggggtggggggtgcttgccttttaggaaagtggagaaggagtagagacacggagagaaggggtcggggggttcttgccttccagaaaagcagagaaggggtagagacatggagagaaggggtcggggggttcttgccccttagaaaagcggagaaggggtagagacatggagagaaggggtcagggggttcttgcctcctagaaaagcggagaagggtagagacacagagagaaggggtcggggggttcttgccccctggaaaagcggtacttgccggtaagggtgaaggactaaagcaggcatccttgcctggtcagacacctctgaaatgtgggtcaggcatccccgcgtgattaaacaccaagggaagcctgtctttccaagtctgtgactggcgccggagttttgggtctacggataaaatgtgtctccctttgtctctaccagaaaaggaaaggaactgaaattaagagaagggagaaattgaagtgtggcgccaagattgataggagaaagaggttgagggatagtgagagaggttggagaagagagtaaaaagaggccacttacctgatttaaaattggtgtgatgttccttgggctggtcggtctgaggacttgaggtcataggtggatctttcttatggagcaaagagcaggaggacagggaactgatctcccaagggag

SEQ ID NO: 42655 - DNA, 1396 bp, Artificial sequence
  DNA replication origin
aaacgctatctgatttgggataaagaaaaaggagcattaaccttgactatgcctttggctccagccacctttttaagagtaaattgctgggcaggtgggggagggctagtcatggaatgaaactgtaagccggaccaggtgtgaggaggggaggtgataaaaagattatagggtggaggagcagaggctgaggaagaattgggacctagctcggcctggcgaggagcagcctggggaggaagggagaggtcagattggtctgtagaaaaggaagattagaaagactcagcgacgcttggggttggtactgaggggacaggcgggagggaaagaaggaagatttgggatgagttgcactgggcacagagactaggaagggactgctgtgtaaaagaatgcctggaagtcaggcacctcagacggtttgcctattttatgacaagaatttagattttgcaggatggaaaaattcaaagtgccattttctggctatttggaactactgtcgagtttgtattggggtcaagcagcattgcagaagaaaataaggcatttaggttttaggtcagttgtgagttgaagaggttttaagttcttgagaacacaggccaagggagtagaaggaggaatggagggtggaaggttgcccatagtgaaggaagcaagcccagagaaaagagagagtagagaaacggagggaaggggtttgggggttcttaccttccagaaaagtgggaaaaggggttggggcacagagataagaggtcggggtgtggaaataagggattggggcacagagataagaggtcggggtgtggaaataagggattggggtgcagagataagaggtcggggcgtggaaataagggattgggggttcttgcccagtagaaaagcgggacttgccgctaagggtgaaggagaaggggttgaggggtacttgcccctctcccagaaaagcagagaaggggtaggagacaatgagagaaagggttgaggtacttgccccttccccagaaaagcgggacttgcggctaagggtgaaggaccaaggcaggcatccctgcatggtctgacaccttattcacccacgtttcaaatcagagaggtgtccctgcaatgattaaacaccaagggaaggctgccttcccagttcgtgaccggcgccagagttttgggtccacggataaaacgtgtctcctttgtctctaccggaaaatgaaaggaattgaaattaagagaagggagagattgaagtgtggcgccaagattgaaaggagaaagaggtagagggatagtgagggaggttggagaagagagtaaaaagaggtcgcttaccggatttgaaattggtgagatgtttcttgggctggtcggtctgaggacctgaggtcat

SEQ ID NO: 42656 - DNA, 1393 bp, Artificial sequence
  DNA replication origin
taggttcctttggttgtattttacaaaatgtccccttttcagaggaataatcacccggtacaactaaggatttcagaaccggctttgggcctgatgaatttcttctctttccatattcagttttcctgctccaagcctcctctcctcctgccccctctttgctctaaattaagaactgtgttgtctttaatgatcatgggggtgaacaacactaggggaggcagaactagctttctaaatcatcacctgatcaccattttctcccctcccctcagtttgctaggcattcatcacttgcaatcagtttgtagtcttatgagttcctatcagagctctctcagtaagtaaggtaatatttgaggacagaaagaggccagggaacccagcctgttctgcccctcaaggtcacttgtttgcagaatttctcatatttgcttcctacacattaggcaattgtcaaattcagctcgttcctagagccaggcactagctttaacagtcaagtgatgtacatcctgaattgactcaatcaagaagctgctgctgcttttttaaatctcatctgaagaaatttctctgaacaaccgtgctatttttttctttctttctttttttttccccagttaaaaaaaaaagagagagagtgttggagaaggaacacactaggttagcatggaggaaaatgaaacttttgcatcaaacactatttggagcagacttttgcccactgtcttgagtttttcccactgtcttaagcccctcagcagtatcatttggagttgatttatgcaacatgaaaccggatggattagagcccctaaaatatctactgaagcaatcatctcccagcacatacacagaccctaagtgccacaagaaagatgcaaatgaggtccccaacgtcccaaagggaggaaaagcagatctacttacaagcatttgtcacggaaaaactattggaggaatccaagtgatctacgtggtaattcaaatggaagggcttctcggtggtgttctggttggtgttgtataactgcacggcaaagcggaaagcgctgtgctcctgcactgtgtttctcatgaaaagtccacctataagcaaagggaacggagatttggcttgtgttcccccacactagggccagttaggaattggggaacaatatagataccggatacctctcaatgatactggggtgtgggattgaggattgatattcaacctgtgtgtctttcaagacttgtgaactcagattttggccaagagaaacctggcttttctagactgaaaagaagaggctagagagaagggagaagagacgagggagccgttttgggttaggacgatggaaccaagagtgagacttggttctttcttagtcggcagccttct

SEQ ID NO: 42657 - DNA, 1441 bp, Artificial sequence
  DNA replication origin
atgctggcctcataaaatgagttatggaggagtccctccttttcaattgtttggaatattttcaatagaaatagtaccagctcttctttgcacttctgttataattcagctgtgaatctatttggtcctgggctttttttttggttggtaggctatttattactgcctcaatttcagaactcattattggtctattcagggattcaatttcttcctggttcagtcttgggagcgtgtatctctgcagaaatttatccatttcttctagattttctagtttatgttcatagaggtgtttatagttttctctgatgattgtttatatttctgtggggtcagggtgataaaccccttatcatttctaattgtgtttatttgattcttctcttttttcttctttattagtctagctagtggtctattttattaattttttctttttttaagcaatttatttattgaaggcgaggcaggaagcggggagggagggcaagggcgacctctcttcctcacagggaccaggccttgtttctctcccagataagctaaggttggcaggggctgaggggagtgaggcagggaggatgcatggggtctgtgggagccagagagaagctggagtcaggtaggagctggggctgtgggggggtgaaaggtgaagcaaggtcaaaggtgaactgcagctcggagggaggggtgcagtgtaaaccaggacttataggtggagaggtaaaatgagattcgtagggggtgaaagagaagttggggtcagaggggattcacgggtgaaagagaagttggggttagaggtaggagctggggctcaggtcgggggttaaaggtgaggcaaggtcagaggtgaagtgcagctcagagggaggggtcaaacataagccaggacttatgggtctagaggtaaaatgggattcatggggggcaggggtcaaaggtgaagcagaggtcaggggtgaaagagggccctcaaagttaaaggtgtggtttccagagtcagaaggggtgaagcggggctcctcctaggaatgtcaaggttggaagagctcaagggggtcaaagataaattagggctcaagggtcaatggggagccagggtcggagatgaagtagccagaggtaaagcgagctccgaaggtattgttagggtcagggtgaagtcttagggtcagggatgagtcaggcttggagggaaagcgggggtctaggggtcagagatggagggcctagggggtcaaaggtcagaagcctcgaggggacagacaggaagcgatgggagcagcctaggccacctcctcctcggcctcctgcttgaactcgccctcctcggctgtggcatcctggtactgctggtactcagataccaggtcattcatgttgctgtcagtctcggtgaactccatctcgtccatgccctcgcctgtgtacc

SEQ ID NO: 42658 - DNA, 1104 bp, Artificial sequence
  DNA replication origin
cacatgtttcagagagcgcagggttgggggtaaggtcatagatcaacaggatcccaaggcagaagaatttttcttagtacagaacaaaatgaaaagtctcccatgtctacctctttctacacagacacagcaaccatccgatttctcaatcttttccccacctttcccccttttctattccacaaaaccgccattgtcatcatggcccgttctcaatgagctgttgggtacacctcccagaccgggtggtggccgggcagaggggctcctcacttcccagtagcggcggccgggcagaggcgcccgtcacctcccggacggggcggccggccgggcggggggccgacccccccacctccctcccggacggggcggccggccgggcggagacgctcttcacctctcagacggggcggctgccgggcggagggtctcctcacttctcagacggggcggccgggcagagacgctcttcacctcccagacggggtcgcggccgggcagaggcgctcctcacatcccagacggggcggcggggcagaggcactccccacatctcagacgatgggcggccaggcagagacgctcctcacttcatcccagacgatgggcagccgggcagagacgctcctcacttcctagacaggatggcggccgggcagagacgctcctcactttccagactgggcagccaggcagaggggctcctcacatcccagacgatgggcggccaggcagagaggctcctcacttcccagacggggtggcggccgggcaaaggctgcaatctcggcactttgggaggccaaggcaggcggctgggaggtggaggttgcagcgagccgagatcacgccactgcaccccagcctgggcaccattgagcactgagtgaacgagactccgtctgcaatcccggcacctcgggaggccgaggctggcggatcactcgcggttaggagctggagaccagcccggccaacacagcgaaaccccgtctccaccaaaaaaatacgaaaaacagtcaggcgtggcggcgcgcacctgcaatcgcaggcactcggcaggctgaggcaggagaatcaggcagggaggttgcagtgagc

SEQ ID NO: 42659 - DNA, 906 bp, Artificial sequence
  DNA replication origin
tgaggagcccctctgcctggctgcccagtctggaaagtgaggagcgtctctgcccggccgccatcctgtctaggaagtgaggagcgtctctgcccggctgcccatcgtctgggatgaagtgaggagcgtctctgcctggccgcccatcgtctgagatgtggggagtgcctctgccccgccgccccgtctgggatgtgaggagcgcctctgcccggccgcgaccccgtctgggaggtgaagagcgtctctgcccggccgccccgtctgagaagtgaggagaccctccgcccggcagccgccccgtctgagaggtgaagagcgtctccgcccggccggccgccccgtccgggagggaggtgggggggtcggccccccgcccggccggccgccccgtccgggaggtgacgggcgcctctgcccggccgccgctactgggaagtgaggagcccctctgcccggccaccacccggtctgggaggtgtacccaacagctcattgagaacgggccatgatgacaatggcggttttgtggaatagaaaagggggaaaggtggggaaaagattgagaaatcggatggttgctgtgtctgtgtagaaagaggtagacatgggagacttttcattttgttctgtactaagaaaaattcttctgccttgggatcctgttgatctatgaccttacccccaaccctgcgctctctgaaacatgtgctgtgtccactcagggttaaatggattaagggcggtgcaagatgggctttgttaaacagatgcttgaaggcggcaggctcgttaagagtcattaccactccctagtctcaagtacccagggacacaaacactgcagaaggccgcagggtcctctgcctaggaaaaccagagatctttgttcacttgtttatctgc

SEQ ID NO: 42660 - DNA, 983 bp, Artificial sequence
  DNA replication origin
cctttacggggtttattagaggcggcccttgctgccacattttcagagcaagcctggtttgacagcctctcctgccttctgcaagggctttttccacagcaacgtgcaggcctgtgtctcctctcctgcctgttcatgggagctcaggaatcccacgtgcaggtcacagctgctccctgagcttccagacacacaggcttccagctcgagaggcacccagttttacggagccttggctcacagcctggcaccatgctcggtgctggagacgtggaggagagtggcagtggtttcctgcccatgaggaccttagctctcaaaagagagagatagccacctgggaacatccggtcacactgtgacagagaggcaagtccagatgctgtgggtgggaccatccaaggcttcttgaggagaggacacctgagcagagattcacaggtcacctgggagttgtgtgaagtagtgggggaggtcttcaagggcccagcgaacagcgtccatgggagcaggggacagcgggaggggaacttggagagtgggagaggcaggcacagagtccagggatctgagggaagagagcgtttcatggaggaaggtggggcccacatgtcccatccccatcaggtccagtaggtgagggctggaaatgcagccttggggtgtagcaagtgttgatcttaggagaggggtttcacagttgaggcatcatggcagaggccagcttacagggggtagagtggtgaacaggaatgaagagacacgggctacagactgctcttctaaaagcttggctctgacatttatagacatagaaatagaaagtcctagttttggggctaagcacggtggctcacgcctgtaatctcagtagtttgggaagctgaagctggtggatcactcgagcccatgagttcgagaccaacctgggcaacatggcagaaccccatctctacaaaaatacaaaaattatcccggcttgg

SEQ ID NO: 42661 - DNA, 998 bp, Artificial sequence
  DNA replication origin
agatgtagctgattataagaaggaagttggggcaacccgctggggtccccttccatgctgtggaagctttgttctttcactcttcacaataaatcttgctgctgctcaaaaaaaaaaaaaaaaaaaaaaagaaggaagttggggaaggatgcagtagaaaaggagtgaataaagaatgaagagataggccaggtgtggtggcttacacctgtaatcccagcactttgggaggccaatgcgggtggatcacctgaggtcagtttgagaccaggctggccaacatggtgaaaccccatctctactaaaaatacaaaaaattagccagctgtggtggcgagcgcctgtagtcccagctactcaagaggctgaggcaggagaatcacttgaacccgggaggcagaggttgcaatgatccgagattgcaccattgcactccagcctgggcaacaagagcgagactccatctcaaaaaataaaataaaataaaatgaagagatagagagaaggttcttattgggggctgggtccaggtatgctgcaaggtaataagagttcacatcatgggttgaaccaagtctcttattctttatcctgagcaactgagaacactgggtccctgtacggagaaagagctggctatcatagagtttgcttgagggttgacatgtgtacagatcctggcctaaatattgtcctgtgccttgttgggcagggatataggtagagtgctgttctgcaggtagttatctcagctggtgttggaactgtaaccacccaacgggttcacctggcccgctgcctagacagagccgatttatcaagacaggggaattgcaatagaggaattcactcagagcctgctgcatgggaaaccagagttttattattacccaaatcagtctccccaagcattcagggatcagagttattatggaggacttggtgggtggggtgccagtgagtcaaaagtgctgattggttgggttagagatgaaatc

SEQ ID NO: 42662 - DNA, 815 bp, Artificial sequence
  DNA replication origin
cggtaggaatgtccggcggagccctgggccgtgggaatccagaggctggctgggttcgctccgggactcgttccccgggcccctccgcccctcgcgaggcgctaaggtggcagcccagtcgggcatcacccttcgaagtcccctcttctgacacacccctgtgaggggcctgtggccctagttcccgtaccttcgatgcccccttgtccctaccccttcccaccaaaagaacccaagtcgcttaactctggcacctgatcctaaatggtttaatggagctacttgggctagatcgggggcggaatacgggttggttttgttttgctttttgcttcgggtgtggagagagagcgagctgattctctaccagtaagacctagccctggaaaagaaagaaaaattgttttgctttacagcccactggtcccgtctccgagaaaacgtggtctgtatctccaggttctaggagtcctaaagaactggactactaggctaggccgggcgctcgaccaatttgttcgccactctcggggcgggggaagagataggaccgagcgaagtggagggaaatcgaaatttgggcaaaaggagtggagggggacctaccccgcctcccccgcgcatccactgccttcctgggcgggtgcaaccacgcgaaatggttgggaatttaggttacttcgcatcctgccttcccatccctcccccaagatgtttgaagtgcgaaaagaccctttctgctcctccgacccctgttaactaaaatctttgtcaccctttttttttgtttgtttcgaatccagtgtattggacct

SEQ ID NO: 42663 - DNA, 937 bp, Artificial sequence
  DNA replication origin
agctcccgcggttctagagcggtggggggttttgaaagtggcggtcggatccggcggggttttttttctttttttttttttttttttttttttttttttttttttttttggtggcgcttcgggattgtttggggtgttcgctcttcggcgacttggaggcgaatggaacgcgcaggcgccatctgtcggccacgaacccgcgcccggctcccgttgggagggagcggcatctagcggcagagagttgccactgcaacgcctggctcccagccctcccacccagcgtcctcctcccagtcaccgaccaatcgtggccgactgactcccgggttcagcgtctccgacgccgcccgcaaaccaggcgcccgcaggggcgcgccgccgagtggggtaaacaaggtgccgtgcccgcgcctgacttactcattcgtttggccgcgcttccgccgcggacccgatcgagccgcggttcttctgtctttagtggggtgtcgaggggagggcggtaggaatgtccggcggagccctgggccgtgggaatccagaggctggctgggttcgctccgggactcgttccccgggcccctccgcccctcgcgaggcgctaaggtggcagcccagtcgggcatcacccttcgaagtcccctcttctgacacacccctgtgaggggcctgtggccctagttcccgtaccttcgatgcccccttgtccctaccccttcccaccaaaagaacccaagtcgcttaactctggcacctgatcctaaatggtttaatggagctacttgggctagatcgggggcggaatacgggttggttttgttttgctttttgcttcgggtgtggagagagagcgagctgattctctaccagtaagacctagccctggaaaagaaagaaaaattgttttgctttacagcccactggtcccgtctcc

SEQ ID NO: 42664 - DNA, 913 bp, Artificial sequence
  DNA replication origin
gtctgagatgtggggagcggctctgccccgccgccccgtctgggatgtgaggagcgcctctacccggccgcgaccccgtctgggaggtgaggagcgtctctgcccggccgccccgtctgagaagtgaggagcccctccgcccggcagccaccccgtctgggaagtgaggagcgtctccgcccggcagccaccccgtccgggagggaggtgggggggtcagccccccgcccggccagccgccccgtccgggagggaggtggggggggtcagccccccgcccggccagccgccccgtccgggaggtgaggggcgcctctgcccggctgccgctactgggaagtgaggagcccccccgcccggccagccgccccgtccgggagggaggtgggggggtcagccccccgcccggccagccgccccgcacgggaggtgacgggcgcctctgcccggccgcccctactgggaagtgaggagcccctctgcccggccaccaccccgtctgggaggtgtacccaacagctcattgagaacgggccatgatgacaatggcggttttgtggaatagaaaggggggaaaggtggggaaaagattgagaaatcggatggttgctgcgtctgtgtggaaagaggtagacatgggagacttttcattttgttgtgtattaagaaaaattcttatcctgttaatctataaccttacccccaaccctgtgctctctgaaacatgtgccgtgtccactcagggttaaatggattaagggcggtgcaagatgggctttgttaaacagatgcttgaaggcggcaggctcgttaagagtcatcaccactccctaatctcaagtacccagggacacaaacactgcggaaggccgcagggtcctctgcctaggaaaaccagagacctttgttcact

SEQ ID NO: 42665 - DNA, 1331 bp, Artificial sequence
  DNA replication origin
cccacctttcccccctttctattccacaaaaccgccattgtcatcatggcccgttctcaatgagctgttgggtacacctcccagacggggtggtggccgggcagaggggctcctcacttcccagtaggggcggccgggcagaggcgcccgtcacctcccgtgcggggcggctggccgggcggggggctgacccccccacctccctcccggacggggcggctggccgggcgggggggctcctcacttcccagtagcggcagccgggcagaggcgcccctcacctcccggacggggcggctggccgggcggggggctgaccccccccacctccctcccggacggggcggctggccgggcggggggctgacccccccacctccctcccggacggggtggctgccgggcggagacgctcctcacttcccagacggggtggctgccgggcggaggggctcctcacttctcagacggggcggccgggcagagacgctcctcacctcccagacggggtcgcggccgggtagaggcgctcctcacatcccagacggggcggcggggcagagccgctccccacatctcagacgatgggcggccgggcagagacgctcctcacttcctagatgggatggcggccgggaagaggcgctcctcacttcctagatgggatggcagccgggcagagacgctcctcactttcgagactgggcagccaggcagaggggctcctcatgtcccagacgatgggtggccaggcagagacgctcctcacttcccagacggggtggcggccgggcagaggctgcaatctcggcactttgggaggccaaggcaggcggctgggagctgaacatttttattaataggtatattttttgagacagagtcttgttctgtcacccaggctggagtgcagtggcaagatcttggctcactgcagcctgtgcctctcaggtttaagtgattctcatcatgcctgagcctgtcgaatagccgggattacaggcgtctgccactacccatgctaacttttgtattttttgtggagacggggtttcaccatgttgcccaggctggtctggagctcctgacctcaagtgatccacccaccttggtctcccaaagtgctgggattacaggcatgagccatcgcgcccggccaatataacatacttttaaatgacatttttttttttggtgtataggtctctaaggagttcataaacaattttatggtgtcatttttctgaatttcccctctttccctctctgccatctttctgatactttcaggtttctaaggcttccatattcagtcctctgaccaggaaact

SEQ ID NO: 42666 - DNA, 1410 bp, Artificial sequence
  DNA replication origin
aggaacccttcagcctgccgctgcactgtgggcgcccctttctgggctggccaaggccagagccggctccctcagcttgcagggaggtgtggagggagaggcgccagcgggaaccggggttgcgtgcggcgcttgcgggccagctggagttccgggtgggcgtgggcttggcgggccccgcactctgagcggccggctggccctgccgccccgggcaatgaggagcttagcacccgggccagcggctgcggaggggtgtgctgggtcccccagcagtgccggcccaccggcgctgcgctcgatttctcgccgggccttagctgccttccagcggggcagggcttaggacctgcagcccgccatgcctgagcctccccccgcctccgtgggctcctgtgcagacggagcctccccgacgagcgccgccccctgctccatgggcgcccagtcccatctaccaccaaagggctgaggagtgtgggcgcacagcgccggactggcaggcagctccaccagcagccccagtgcgaaatccactgggtgaagccagctgggctcctgactctggtggagacttggagaacctttatgtctagctcagggattgtaaatacaccaatcgacactctgtatctagctcaaggtttggaaacacaccaatcagcaccctgtgtctggctcagggtttgtgaatgcacctcaacactctgtatctagctaatctagtggggaagggtggagaacctttgtgtctagctcagggattgtaaacgcacgaatcagcaccctgtcaaaacagaccactctgctctctgtaaaatggaccaatcagcaggatgtgggtggggctggataagagaataaaagcaggctgccagagccagcagtggcaacctgctggggtcgccttccacactgtggaagctttgttctttcgctctttgtaataaatcgtgctgctgctcactctttgggtccacactgcctttatgagctgtaacactcactgccaaggtctgcagcttcactcctgaagccagcgagaccacgaacccactgggaggaacgaacaactccagacccgccaccttaagagctgtaacaccgtgaaggtccgcagcttcactcctgagccagtgagaccatgaaccccaccagaaggaagaaactccgaacacatctgaacatcagaaggaacaaactccagacacgccacctttaagaactgtaacactcaccgtgagggtccgcggcttcattcttgaagtcagtgagaccaagaacccaccaattgtggacacagggaggcctcacaatcatggctgaaggtgaaggaggagcaaaggcatgtcttacatggtggcaggcaagagcatgtgcaagagaactgccctttgtaaaaccatcaga

SEQ ID NO: 42667 - DNA, 1368 bp, Artificial sequence
  DNA replication origin
aggaccacttgtgctctctcgctcccgctctctctctttctttctctgcctaatacattaagcacacgtaagttggactggttccacctggaagacaaaagccacacaaagttaaaagcacaaatgcagcatgaagaaggaaagtcaggcggaactgaaaggtaaacctgtgcactttgagaacaaggcgtccatccttaactccagaggcctgcgtagttcccatggaggcctgaagggagaggccccccagccacaaagagcttcatctccggccagttgtagcagtgggtgtagagcgcattggggaactctcccatgccaccaaagtagttcacccagacgtcatcttggttgagccagcctctgccgcaggcaagcttgagcttcctccctgcgggccccggcatggagtccaggctggaagaggccctctcctccaggaacttctgggcgcggatgtcatagaagagcagggaaccatggccggtgcccacagtgatgatgtgctggtagaagctcagcgaccgcacgcctgtgccaccctctcgagagcacaggggccggatgttctgctggcgctggcgcggatccaggaaggagacgtgggactgagagcccacagcgtacagggacaactcatcacagtaggtcaggcacacattctctcggcagtagggcagcctgatggacaggagcctggatagtgtgctccgggctttccacaggtggaagtagccgtccaaggacaccgctcccagctcctggttcttgccgctgaaggccagggcccgtaccttgcggttgctggggttggtgctggccctggggatggcctccacatccctcggacggatgtgggcatatactgggagacccacctcgctgtgccaggcaatgctgccattaaacatgtctgggtccatccgccacagagccacggtgccgtcgcgggagccgctcacagctacggtgtcactcagccaggcgactgcgaagatccagtccttgtggccatggcggtcgcccaggcacagggggtccagggtgggcagctggtagatggccaggctgttggggttttcgccgccggtggccagaagcgtcttggagggattcagctcgatggcatggatgccgcagccctggtgggcctgggccagcccggcctccttgtcccgcatgagggggatgcgcgtgatgtggcctgactgcacgtccaccacaaacagcgtattacacttggtgccgcacaccacctgcctggcgttcagccactgtgacgcgaacaccttgttgagggtgcccaggtccagctggcgctccgtcagcagctcgggcagcctctggacggcgtagccccgcagc

SEQ ID NO: 42668 - DNA, 1164 bp, Artificial sequence
  DNA replication origin
cggcgtagccccgcagctcgccctcgaagccctggagcccggctgggccccgcgctcctacctcccggcccttcagatagtgcaccagcctgcgacgcgtcgccggccgcttctgcttcttgggtagcagaggcccctctccgtccgccgccgctaaaccctgcgacgacgagctcccggctcccgcctcgaccgcgggcgctttccgtttcctgctacctgtttgctgctgggccatggtgggcggcgggcgatctgcagcagcggcggcggcggcggcggcggcggcggcggcccggcggcggtggcggcgcgtggcacccgtgttggccgtggcggcggtggtggggatggctgcgcttccgcgtcagccgagagctcaggatctctaagaccaagaagctggtgcgatcgcgggcgcccagacttcagtctgaggctcggcggcggcggcggcggcagcggtcgtcctggccagagatgcgcggcctgacgtagcagagccggggcgaagcgcggcggcaagggcggcagtggcggtgcagacctaggcgagagcgggaagagtgtctgtctggatggctgcgggagcgaagtcagtgtggggggaggacgacgctggggcccgagtgtgaagggcggaggcagtgggaggagctgctgggctggcgtggggtgcctgccgggtagcggaggccgcgcggggtggaggctggaagggggcggaggggagaagggggtagcggagctgcaggggcagagtcgcggagggccagcaccctaggtccccagtatcagacatgcgttgtttcgctaccctcaggacaacagctaactacccttcttaaaatccgtacttcagtaaaatctgaaacctaagatataatcaagcacggggctagaaggaggccgagccacggtctgcctggagaaaccagtgtgcgcttggtgtaatcttgggacacccttcgcttagattatacattgaatttggcaagggatcgggtgcgggggtgggggggtgtggggttcagcagcgtcagggagacctctaccctcgtgtcagacctgcagcttctccagtttcagctcctgggttgatgtcttaaacagtttccaccaaataatttttttccccttctcaaactgaagtctttgagcacc

SEQ ID NO: 42669 - DNA, 1231 bp, Artificial sequence
  DNA replication origin
gctaccctcaggacaacagctaactacccttcttaaaatccgtacttcagtaaaatctgaaacctaagatataatcaagcacggggctagaaggaggccgagccacggtctgcctggagaaaccagtgtgcgcttggtgtaatcttgggacacccttcgcttagattatacattgaatttggcaagggatcgggtgcgggggtgggggggtgtggggttcagcagcgtcagggagacctctaccctcgtgtcagacctgcagcttctccagtttcagctcctgggttgatgtcttaaacagtttccaccaaataatttttttccccttctcaaactgaagtctttgagcacctgaatccctgagcatttgaactgcgttccaaatgcagttccctaggccctgctttccacccgggtggtatcagggaccctttagtcagaaagcagcctcaggagcatccagggctgcagtgatgataggggtggagacatgggggtgaggggtgaagagaagggtttttctgtaaggcattgagttctttcgaactcagcccagggcgggtggagtgaaggggaagaggtccaggagaggggtacctccctctctctcctgggacggaaaggtcagcccaaactttcagtcataggaatcttggcagagccctctcttggtgtgggggcccccttgggcattggtacagtactcagaggaatgcacaggatttccacaggcacagatgataaagaactttgcaaagtgactaaatggcaaaatggtgagagtgtggatattcaaagcatgagtttggcagtctgagaagttacatgatccacacctgctctaaagctttagggcagtcaatcctaaagcaagcccccaattccacagtaataccttgcactgaaatgctggtggctgataccaggtctgcacaggccccaatcgtcctccacaaaaaaagtctttgttaagcgtgtttgcagaagtcaggtggtgagttaactgtccttgatcagagatcatgaaaatactttgttgctgtttccccccaattctccctgctctttttacaaacttatctcaaacccagaaactccaagtgcaccatggatccttcacatcactccagtccaactgttgcaccttagtgcccatcctccccttctctgcctcaatattcctacccatgtttagtgctgtatcaagaggagggtgagggtgacggattgg

SEQ ID NO: 42670 - DNA, 1512 bp, Artificial sequence
  DNA replication origin
gcctccgcccctcccactcggccccccgcgtcgatctcgccgcacgctgactttgctctcactgcccggccagacgcacttcccgccttcgcctaggtctgcaccgccaccgccgccctctcccgcgcgtccctcacccggtccgccactgccgcgcctcagaatccgaaggctcggttccagcgcagccatccacgccgccgccacgaccgactccggagccacgcgctgcaaccgccaccaacgccttgccgccgccgctcgcccgccgcccaccatggcccagcagcaaacaggtagcaggaaacggaaagcgcccgcggtcgaggcggacgccgagagctcgccgtcgcagggcttggcggcagcggacggtgaggggccgctgctactcaagaggcagaggcggccggcgacgtatcgctcgatggcgcactatctgaaggttcgggaggtaggcgggtggggccccgccaggctccagggcttcgatggcgagctgcggggctacgcggtacagaggctgcccgagctgctgacggagcgccaactggagctgggcacggtcaacaaggtgttcgcgtcacagtggctgaactccaggcaggtggtgtgcggcaccaagtgtaacacgcttttcgtggtggacgtggagtcaggccacatcgcgcgcattcccctcttgcgggacagtgaggccaggctggcccaggaccaacagggctgcggcatccatgccatcgagctgaatccctccaagacgcttctggccaccggcggcgaaaaccccaacagcctggccatctaccagctgccctccctggatcccctgtgcctgggcgaccgccatggccacaaggactggatcttcgccgtcgcctggctgagtgacaccgtagccgtgagcggctcccgcgacggcactgtggcgctgtggcggatggacccggacaagttcgatgacactgttgcctggcatagcgaggtgggtctccccgtatatgcccacatccgtccgagggatgtggaggccatccccagggccatcatcaaccccagtaaccgcaaggtgcgggccctggcctgcggcggcaagaaccaggaactgggagcggtgtccttggacggctacttccacctgtggaaagccgggagcgcactatccaggctgctgtccatcaggctgccctacttccgggataatgtgtgcctgacctactgtgatgatatgtctgtgtacgccgtgggctcccattcccacgtctctttcctggatctgcgccaggaccagcagaacatccggcccctgtgttctcgagagggtggcacaggcgtgcggtcgctgagcttctaccgccacatcatcactgtgggcaccggtcagggctccctgctcttctatgacgtccgggcccagaaattcctggaggaaagagcctccgccaccctggagtcctcttcgggacctgcaaggaggaagctcaggcttgcctgtggcagaggctggctcaa

SEQ ID NO: 42671 - DNA, 1213 bp, Artificial sequence
  DNA replication origin
actgtcccgcaagaggggaatgcgcgcgatgtggcctgactccacgtccaccacgaaaagcgtgttacacttggtgccgcacaccacctgcctggagttcagccactgtgacgcgaacaccttgttgaccgtgcccagctccagttggcgctccgtcagcagctcgggcagcctctgtaccgcgtagccccgcagctcgccatcgaagccctggagcctggcggggccccacccgcctacctcccgaaccttcagatagtgcgccatcgagcgatacgtcgccggccgcctctgcctcttgagtagcagcggcccctcaccgtccgctgccgccaagccctgcgacggcgagctctcggcgtccgcctcgaccgcgggcgctttccgtttcctgctacctgtttgctgctgggccatggtgggcggcgggcgagcggcggcggcaaggcgttggtggcggttgcagcgcgtggctccggagtcggtcgtggcggcggcgtggatggctgcgctggaaccgagccttcggattctgaggcgcggcagtggcggaccgggtgagggacgcgcgggagagggcggcggtggcggtgcagacctaggcgaaggcgggaagtgcgtctggccgggcagtgagagcaaagtcagcgtgcggcgagatcgacgcggggggccgagtgggaggggcggaggcagtgggaggagcaggcggtcgggcaggcggttgtgagcgcgtggggtgcctgaggagtagctgaggccgggcggggtgaaggctgggagggacagggaggggagggggtagcggagctgcaagggcagagtctaggagggcccgcaagccaggatcccaagtatcagacacgcggcatttcgctaccctcaggacaacagctaactacccttcttaaaatccctacttcaataaaatctgaaacctacgatatagtcaagcacggggctagaaggagcccaggccacgatctgtctggagaaaccagtgtgcacttggtgtaatcctgggacacccttcgctaagattagacattaaacttggcaagggatgggggattcggcagcgcagggagacctttacccatatgtcagacctgcaacccctcaagtttcagcccctcagttgatgtcttaaacagtttcaaacaaatattttttccctcctcaaattgaggtctctgagctactgccacagtcc

SEQ ID NO: 42672 - DNA, 1159 bp, Artificial sequence
  DNA replication origin
caacttctttctacacagacacggcaaccatccgatttctcaatcttttccccacctttcccccctttctattccacaaaaccgccattgtcatcatggcccattctcaatgagctgttgggtacacctcccagacggggtggtggccgggcagaggggctcctcacttcccagtaggggcggccgggcagaggcaccgctcacctcccggatggggcggctggccgggcggggggctgacccccctacctccctcccggacggggcggctggccgggcagaggggctcctcacttcccagtaggggcggccaggcagaggcgcccctcacctcccggacggggtggctggcctggcgggggctgacccccacctccctctcggacggggtggctgccgggcggagacgctcctcacttcccagacggggtggctgccgggcggaggggctcctcacttctcagacggggcggctgccgggcggaggggctcctcacttctcagacggggcggttgccaggcagagggtctcctcacttctcagacggggcggccgggcagagatgctcctcacctcccagacggggttgccgccgggcagaggcgctcctcacatcccagacggggcggcggggcagaggcgctccccacatctcagacgatgggtggccgggcagagactctcctcacttcctagatgggatggcggccgggaagaggtgctcctcacttcctcgatgggatggtggccgggcagagatgctcctcacttcccagacggggtggcggccgggcagaggctgcaatctcggcactttgggaggccaaggcaggcggctgggaggtggaggttgtagcgagccgagatcacaccactgcactccagcctgggcaccattgagcactgagtgaacgagactccgtctgcaatcccggcacctcgggaggccgaggctggcggatcactcgcggttaggagctggagaccagcccggccaacacagcgaaaccccgtctccaccaaaaaaatacgaaaaccagtcaggcgtggcagcgcgcgcctgcaatcgcaggcagtcggcaggctgaggcaggagaatcaggcagggaggttgcagtgagccgagatggcagcagtacagtccagcttccgctcggc

SEQ ID NO: 42673 - DNA, 1198 bp, Artificial sequence
  DNA replication origin
cagacggggtggcggctgggcagaggggctcctcactttccagaaggggcggccaggcagaggcgccccccacctcccagacggggcggcggccgggcggaggcaccccccacctcctggatggggcggctggccaggcgggggctgaccccccacctccctcctggacggggcggctggccgggcgggggctgaccccccacctccctcccggacggggcggctggccggctgggggctgaccccccacctccctcccagacggggtggctggccgggcgggggctgcccccccacctcccggacggggcggctgccgggcggagatgctcctcacttcccagacggggcggctgccgggcggaggggctcctcacttcccagacggggcggctgccggccggaggggctccgcacttctgagatggggcggctgccgggtggagacgctcctcacttcccagacggggcggctgtcgggcggaggggctcctcacttctcagatggggcggccgggcagggacgctcctcacctcccagacggggtcgcagccgggcagaggcgctcctcacatcccagacggggcggcggggcagaggtgctccccacatctcagatgatgggcggccgggcagagacgctcctcacttcctagatgggatggcagccgggaagaggtgctcctcacttcccagactgggcagccgggcagaggggctcctcacatcccagacgatgggcagccaggcagagacgctcctcacttcccagacggggtggcggccgggcattggctgcaatctcggcactttgggagtccaaggcaggcggctgggaggtggaggttgtagccagccgagatcacgccactgcactccagcctgggcaacattgagcactgagtgaacgagactccatctgcaatcccggcacctcgggacgccgaggctggcagatcactcccggttaggagctggagaccagcccggccaacacagcgaaaccccgtctccaccaaaaaaatatgaaaaccagtcaggcgtggtggcgcgtgcctgcaattgcaggcactcggcaggttcaggcaggagaatcaggcagggaggttgcagtgagcagagatggcggcagtacagtccagcatcggctcggcatcagagggagaccgtggaaagagagggagagagagaccgtgg

SEQ ID NO: 42674 - DNA, 930 bp, Artificial sequence
  DNA replication origin
gaggagcgtctccacccggcagccgccccatctcagaagtgcggagcccctccggccggcagccgccccgtctgggaagtgaggagcccctccgcccggcagccgccccgtctgggaagtgaggagcatctccgcccggcagccgccccgtccgggaggtgggggggcagcccccgcccggccagccaccccgtctgggagggaggtggggggtcagcccccagccggccagccgccccgtccgggagggaggtggggggtcagcccccgcccggccagccgccccgtccaggagggaggtggggggtcagcccccgcctggccagccgccccatccaggaggtggggggtgcctccgcccggccgccgccccgtctgggaggtggggggcgcctctgcctggccgccccttctggaaagtgaggagcccctctgcccagccgccaccccgtctgggaggtgtacccaacagctcattgagaatgggtcatgatgacgatggcggttttgtcgaatagaaaagggggaaatgtggggaaaagatagagaaatcaaattgttgctgtgtctgtgtagaaagaagtagacataggagactccattttgttctgtactaagaaaaattcttctgccttgggatgctgttgatctatgaccttacccccaacccagtgctctctgaaacatgtgctgtgtccactcagggttaaatggattaagggcggtgcaagatgtgctttgttaaacagatgcttgaaggcagcatgctccttaagagtcatcaccactcactaatctcaagtacccagggacacaaacactgcggaaggccccagggtcctctgcctaggaaaaccagagacctttgttcacttgtttatctgctgaccttccctccactattgtcctatgaccctgccaaatccccct

SEQ ID NO: 42675 - DNA, 1250 bp, Artificial sequence
  DNA replication origin
cggattgggtaataaaatgtatattgagaataagacggccttttgaccttttagggtccagagctgtaaagagtctcagggttgctgccaaacgagccatgaactgggctgggtttttatatttgattaaaaagagcctaaacactctccgatttgggacaaagaaaaaggagcattaaccttgactgtgcctttagctgcaaccacctttttaagaggaaattgctgggcaggtgggagagggctactcacagaatgaaactgtaagccagaccgggtgtgaggaggggaggtgataaaaggattatagggtggaggagcagaggctgaggaagaattggaacctaactcagcctggcgaggaggggagaggtcagatgggtctgtagaaaaggaagattagaaagactcagcaatgcttgggcttgggactgaggggacaggcgggagggaaagaaggaagatttgggatgagttgcattgggaatagagactagggaggggctgatgtgtaaaagaatgcctggacatcaggcacctcagaccatttgcccattttacgacaagaattatttagatcttgtaggatggaaaaaatgaaagtgctgttttctggctatttggaaccactgtcgagtttgtattggggtcaagcaacattgtagaagaaaataaggcatttaggttttaggtcaggtgtgagttgaagaggtttttaggtttttaagaacacaggctaagggagaagaagggggaatggagggtggaaggttgcccatagtgaaggaggcaagcccagagaaaagagagagtagagacacggagagaaggggttcgggggttcttaccttccataaaagtgggaaaggggttggggcatggaaataaggggttgaagtgcagagataagaggtcggggcatggaaataagggatcagggcacagagataagaggtcagggcgtggaaataagggatcggggcacagagataagagatcggggcacagaaataagggatcggggtgcagagataagaggtcggggcacagaaataagggattggggggttcttgcctcccagaaaagcagagaaggggtagagacagggagagaaggggttacggttcttgcccctcccccagaaaagtgggacttgcagctaagggtgaaggaccaaggcaggcatccctgtgtggtcagacacctctgaaacgtgggtgaataatcagagaggcgtccctgcaatgat

SEQ ID NO: 42676 - DNA, 885 bp, Artificial sequence
  DNA replication origin
cgcccaggagccctcgtcccctgccttgtccccctactcgttcccgctcccacggcatggagcaggacactgccgcagtggcagccaccgtggcagccgcggatgcgaccgccactatcgtggtcatagaggacgagcagcccgggccgtccacctctcaggaggagggagcggccgccgcggccaccgaagccaccgcggccacggagaagggcgagaagaagaaggaggtaaataggaagggggtgtgtgtgtggtggacaaatcctgtgcctggcccctctgaggggcccaaaccctgacctttcggcgccgacaggtacccgcggagctttgcggggctaggggcggcgggtgcgggggtcggcggcggaaccgcctggcgttcgctcccctccccctttccttctcgccgcctggaggacgggggcggggctgggcgcgggcgggagcggcgcggggtggaggggtgcccgctctcccggggcctgggggctcgggagcccctcgacagcccccgaccccctccaccttcccggaactcgggtaacggggtgggggatggggctgtgcaggaaaaagcctccgcctctccctctcctctcgctcgctccctctccccccgccttcccgtcggcctctgcctgggaaatctgggcccttcaatcccacactcgcgctaaaggggttttgctggggctttttttgtaatttgaatttcaaggtgctggtggttgctgggtggagggtgacagggaagacatttctttctttcattggcaatgtcggtcttttggatggcaggaaaaaaaccatcccttgttcgtttgaaccccgcctgccgaggtgggggtgtcaccccgaggaaaggagctctctgcgtcg

SEQ ID NO: 42677 - DNA, 1126 bp, Artificial sequence
  DNA replication origin
cggaatctgcggcggcctggaaaactggcgggggcgcgaggcgccgctctctcttgggtcagattctcagctcccagctccccgctcccggctcccggcgcccggcgcccggcgcggagctgttcctcaaacgacacgcagccgaggtgggtgggtgtggggacgcgggagccagtgtcgtcggatcggcccgcagtccgctgtcctgctgagcccggaggccgcctggatggagccgccgctcccggtcggagcccagccgcttgccgtatccgccggagagaagggagaggggaggccgcgcagggccgggggtgggggtcgggggccctgcggaacacggtggggcggggcaaccgggtggcccagaggccgagcagagagggggagggggccggcgcgggagacgaagcagggcggggcggggcgggggagggcggcggtggggggggggtggaagacccccttcgccccgcagtgcaccactcctccccaccgcgcttccgaaggagacccttgactagcgcccgcatactgtcgagggtatggagatgaagggtcctctccgggagccctgcgccctgaccctagcccagaggaacgggcaatatgagtaagtaaccacctgattcccacagaggaggggagcctgccattacctcccaaccccaaaccgcgacgggtcacccactgtcctcctactgaagccacgcgggcaacaggttcaggtccaggtgtgaagtgccagtgctctctaacctcggggctttgtccccaacttccaagcctctggattgtgcttggcagtgtggctcagtggaaggactgaatgggcggggaagcaggaagcctgggttcttagttcctgcccctgcaactgacatgtgttgtgtaacgttgggcaagtcaataaagctttctgggccaaagttaactcttcagtttaataaaaccattaactgccttaccttacagcctttggaattataactgggggaaaaataaatgcgagagtggcttccaaaaagtaaaagtgctatggaaatgcttcattgttaacgttacagacttgtcttaaccctattcagctggtttctccagtctccccgtccccttatcccactgg

SEQ ID NO: 42678 - DNA, 1783 bp, Artificial sequence
  DNA replication origin
ctctggctggggacagcatgccagtccgggccaaggacaaagtggttctgggattcctgcttctaacccaggacaggagccagcgggagcaggacatgtgtacctggacccttggctggtggccacttccagggacatgcccttccttggctccaggagaagtcagggagtagagaagtcagtgagagccctgaaagtttccagcacgaggcttgagcaaaatgtgagggcaacgaatttatccaaatcacagtggacagatgacctaatgaagacgggggaattaaagcacgaagtggcaggctctggaccagccacatggtgttcgggcatcctggctgacttcccttcccttgaaaccagctctctcccctttgctagtactgtcccaatggctgggacccaggagggtctgagtggttgtctattggccaggggtctccccacagcctctggggggagcaccaagtgtgcagatccaggagccctaccttcctctggaacactctctgcacccagtcttcttcttccctgaaggcaccaccctggactatttgcctgtggtggtattgtgcaagtgtcatgccttgccaatgacaccagatggtaggctccctgaggataggctggtatggtgtatcattcgtatcttacattcgtatcttttgctccctctgttacctgcctgacaggagtttctgtggaaaaagcctacccacttcttactgtggtggtggctcacttcgtgttcaggtcttgaatagagaaatcaccggccagctacctggaggcaggaggtgccagccccaaccactgcacctttctgagaagccaggcagtgttcccagagccacagcagggccaaaaagcaagagcagagaaaggaggtggcctgcgatgagaggcaggcagagctggctgggcccctcggaggctcctgggctgcatgccatcctcctgttctggagggtttggaaccacttagggccctgtgcccttgccccaggaaactcactgccctgccttctccttctttctgctcccacctccctgtgactccagccatggtcctggcgttagtccacctggtcttggccttccccttgtgtggtgccaggcaggcagcaatgacagccagatcataggactgtggcagctggaggtgggagctggcagccccaggagacattgacacagaggacaggcagcctgggatggggctgctggggcgtggttggggaccaggctaggggcggacatgggcactagtgccaagtattggcaggtgagggcaaaaggactcccctttcctgagctgcagggaggggtcgggtcaggtgctgtgcttcctcctttggtgcctagcggcagggagactaaagtgaagcatgtccgtgcctgggacagaaaggaaggctggagccaggatgtaagagaaccaagtctctgggggtgggatggaggctatggggagggcatcctgtgcaggggaggagaccagccaggaccttggggttagggaggagaagaccagcccagcccggctgggcccggccctgcctgggggaggctgcctctgctcacacatgcaggccgaaaggagcaacagctgggctccatgccgccaccccctccgcgcactcctgcctatgcaacaagtgtcacgtctgcatgttggcacatcatccccggtttcccgcgcccctggactggcgggaggctcccagccttcagggaccagaagacgttcaacatgggagcccagcccactcgactctggtca

SEQ ID NO: 42679 - DNA, 1305 bp, Artificial sequence
  DNA replication origin
atttcaaagatattttaaatatgccatggtctctcatgtcttttatggcacacacgcaccctgtccaatgtatcttttgtgtaaatctggacttaacacttcaagcaaactgcctggcttgctgaaaggtggagacacctttcgattcagtcttttaatatgtgttgagtgccacctatgtgcagagcaagatattggggactttggagagatccagaagagtgagaagacagtatcctaccttagggggttcccagtccaatgagggaagcagccccatgccttgggagctcccaagctatagaagcagctaacaatcgagtctggaaaggcaaacaacttcaggacccgcttctaaagcggaatcgcaagtacacgcaaaatgaatccagccttgactgtgtggagttgggtaaaccacctgcctcttacgttgatggggaactagaatgaggacagctccagggaacaagaaagggtagaccataggagctgtcccatgtcccaacagtggggaggagctgatgggcggcccctgctggattagtgttatcctgagaaggcttctggatgcgatgggatttgaggtgctgctgcaaagaatgaattgctcacggaagggtggggtgggggcattccaggtagagggtgcctcctgggggatgcagggaacatgaggggcctgggcaattaatcaagccttgggcacaagcctaggcagtcacccccaattcaaagccagttgaaaatgcagaggagagaggagggccagtgtttggttgtcttgaccaaacccttgaagctggccagcggcaagggcaaggaccagggtcagaggtagagggcgtgagtgaaggcaacccagactgagtccttccctaagcgcccaggtttcctgacagctgttaaggaagcaaggtgagaaagggttaagtgtgcccctccaccgccccaaatgcttcctgtgtttgaaatccttcaggtctctgcaaaccctctggcccccggccaggcgggcattgtccggggagcggttgtaggttgtcagagaggccgcgcagcctttgttgtggggccacctcggggttccctctcgcgctcacgctcgggctggggctgcagagtgcgtgcctggaggggggcggtgcgggaggctcgctccctctccctcttcctgccccccctctagccctcccgatgaccacatgaccaagtgggctcgcggccaagccacaagctacaaaatgcagcccctggagtgagcggggagcattctctctggcagccggggtcacgggcagttgc

SEQ ID NO: 42680 - DNA, 1361 bp, Artificial sequence
  DNA replication origin
caccctcatgcctcctcccgggggtgggcatgaggggcacttacgagctgagacctcacaggcgacattttttaagctgctcattctgacggaacagtccccaagacaaacacaaggctttctgtctcccagggcttgtgcgacttggtttcagactctgccacccactgccgcagacagcggccgtcttcccaggaagaagacatttcctggcggggtaccgggactgacgggcggcggcgcagggcagtgccagccgggcccaggaagtgaacgcgctgggcccgcgaaggagcgcgtcgcccgccctgaggggggcagtgcagcgcccaccgcgcgccttcgccagtcccctggcaccgttgccctggccaggggccgggagagggcgtggcagcgcggcagtgcgcctacgcaccgggggcactggggatcccgcccccacgctggttcccgcgctttcaagagcctcagagccccgagacaagggggtgtcggctctacccacctggcccagcccgaaagaacagggccaacattttgaaaccaaaccaataatagaattggaatacttttgatcactttttattttccttttctggaggagagttgtggggcgggggtggggagctggtagagagaatctcagggcgctgtggctttgagggcgggttccctgcgcaagcagcagtgctcacagtgcgagcaatcatggctaggcccagcccgcggttagttgggtgcagggacgtgacaggaccgcgagggctgattctttagtctattgttcccactcctcagaaaggactcctagcaaatatatactgctagtcccagctttcccgatggaatggaaccccttgctttgctttgctgtcgctattcaggatggggattttgtccatgcagaaagacatttacattatctacactggaatgccggcccactagcctggcaaaatgctgagccagctattagatctggactcgtggaggagtggagatttgcctccattcaagcaaccacatacttccctggaagctgggaggagcaccactaagtccaccctctcctgcctggctccttggtagtgcttctcaaacattatcacttggacaaatcacctgaggtccttgttaaaagtctgatttagaaaatctggggaatccggtggcacccgagactgcatttttaacaagctcccaggtgatgcagctactgctgtgcaccacaccttgagaagcaaggggtacaacattgctctcaactgcggctgcacattaaaattaacttggggagctttaagaactaattaggccaggacccccacccccaagatattctgatttagttggtctag

SEQ ID NO: 42681 - DNA, 1470 bp, Artificial sequence
  DNA replication origin
cgaccactggggccccttgtcaggaggagacagcctcccggcccggggaggacaagtcgctgccacctttggctgccgacgtgattccctgggacggtccgtttcctgccgtcagctgccggccgagttgggtctccgtggttcaggtaacgaggggtgggggcgggggtctcctgggctcggctgcagggtgggctgcctccccttccgcggcgcctggaggcggggacgtcggcaccgcccttctcaactcggcagccgccgagcccctggcccggggtgactacacgtggcggggcgtgtgtgagtgtgtacgagcgtgtggctgcgtgtgcgtgtggatgtggcgcgcgtcccaacctgcctggggcggtggtccgcggcgtggcggagtcagggcgggcctcgagaggccgcgcccgcggctcggccccggactccggcctccggcctccggccccccgctggggagccggtcgctgcttcccgacggattttgatctttgttcttccaggccggctcccccttcctggtctcccttctcccgctgggccggtttatcgggaggagattgtcttccaggttagttttacacaaaggacgggttctctgcacctctgggcccccctccccttccccgaaccttctaccttctcgtttccctgctccgctcctaggctgtttttggacctttgccctctccagcccgcgagttggctgtttctccctccgtccgtcgggctgcaggcttccgcctcagtcctgccagcgtggggcatgtggtgtcggtaaatagaggccacaacaccacacctgagcggaggagaagggtagcagaggctgagaaactctgggcctgggaattcaggatgctgagtagagatggtacttaggacatgtcccagaaagcgcccttgtgacttttcttagctgctgccattccccaccccccaaccagccatcagcagtcaccaaccattccagaatctctcctgcttaagtcagcctttcacctacaggtctctgatgtggtttcattaagattctcacaaatgttaggctagaccagccagattgtttcatttcccggactcaggaagttgcagagggtttgatgaggggaaatctgttttgtgtaaatacaatgcacgtatgtgcacagagcgtccagaacctcctggccctgccagagggtgacttgttccctgctgtgattcatattcgagtggctaattgaagaaagaaggtgaagtggaggaagggagggaggttttataaggacagaaactctactattatttttagagtccttttaatgatgttgaaagaacactgtggcatagtggaacatgcccttgactggaagttagcagtatcagcattgctgctgtgtggtcctggataagttatttcctctctctggtcctcagtttactcatttacaaaacaaagtattaataattggcacg

SEQ ID NO: 42682 - DNA, 1009 bp, Artificial sequence
  DNA replication origin
gggactacaggcgagtcccaccgctccccgctaacttttgtctttctagtagagacgggttttgccatgttggccaggctggtcttgaactcctgacctcaggtgatccacctgcctcggcctcccaaagtgctgggattacaggcgtgagccaccgcgcccagcccaatctcaaacttttaatgcatgcaactcactcggatcagtagcagtggctcatggtggcagtaatgcagagctgggtggcagaaggaaaaaatcaatctggttggtgggtgggaattctgccttggattctccccttaatcatcataagctttccaaaccgaataaaaatttacaacctttttggcaatctttacttcattacctacctggaagaatttatgtcctcagtggagtttctttaactccattaatgtcaattagttgttttaggtgctgcaaaatgataatacgttcttggggacatttatcctttacaacatgctttttatgcttgtttgtgtgttttgatttgaaagacttagagatgcaggctagggtgactgggacagatatggggtccctggctactgaatgagacttgggaggcagatgacttgtttttatgccgataaagagtaaaatctcaagttgcggttgattttaaaatgcaagcagggctggagaggcccatggcagacctagtttggggtgagcacccggatctgtgagctagtgttgcttcagcatctcactgtgtgtgtgtgtgcgcgcgcgtgtgtgtgtgtgcgcgcgcgcgcgcgtgtgtgtaggctggttccaccctttgctgtcccatcggcactacccttaacctccgtctctgcgtaactatattaatagaaggcaacacttcacatactggcgctcagaccccaaagagaggctggcagtggcttggcaggtgggcatgcagcagggagatgggtggaggagtgggcggaggcatcgtcgagtggcgttaggcaaaaccaatggcagttcg

SEQ ID NO: 42683 - DNA, 1271 bp, Artificial sequence
  DNA replication origin
tggacggggcggctggccgggcagaggggctgctcacttcccagtaggggcggctgggcagaggcgcccctcacctcccggacggggcggctggccgggcagggggctgactcccccacctccctcccggacggggctgctggccgggcggggggctcacacccccacctccctcccggatggggcggctggccgggcggggggctgacccccccacctccttcccagacggggcggctggccgggcagaggggctcctcacttcccagtaggggcagccgggcagaggcgcccctcacctcccggatggggcggctggccgggcggggggctgaccctccccacctccctcccggacggggcggctggcctggcgggggctgacccccacctccctcccggatggggtggctgccgggcagagacgctcctcacttcccagatggggtggctgccgggcggaggggctcctcacttctcatatggggccgttgccaggcggagggtctcctcacttctcagacggggcggctgggcagagacgctcctcacctcccagacagggttgcggctgggtagaggcgctcctcacatcccagacggggcggcggggcagaggcgctccccacatctcagacgatgggcagccaggcagagacgctcctcacttcctagatgggatggcggccggggagaggcgctcctcacttcctggatgggatggcggccgggcagagacgctcctcactttccagactgggtagccaggcagaggggctcctcacgtcccagacgatgggcgtccaggcagagacgctcctcacttcccagacggggtggcggccgggcagaggctgcaatctcggcactttgggaggccaaggcaggcggctgggaggtggaggttgtagcgagccgagatcatgccactgcactccagcctgggcaccattgagcactgagtgaaccagactccgtctgcaatcccagcacctcgggaggccgaggctggcggatcactcgcggttaggagctggagaccagcccggccaacacagcgaaaccccgtctccaccaaaaaaatacgaaaaccagtcaggcgtggtggcgcgcgcctgcaatcgcaggcactcggcaggctgaggcaggagaatcaggcagggaggctgcagtgcgccgagatggcagcagtacagtccagctttggctcggcatcagtgggagacggtggaaagagagggagagggagaccgtggggagagggagaggga

SEQ ID NO: 42684 - DNA, 976 bp, Artificial sequence
  DNA replication origin
gggggagtcagccccctgcccggccagccgccccgtccgggaggtgaggggcgcctctgcccagccgcccctactgggaagtgagcagcccctctgcccggccagccgccccgtccaggagggagatgggggggtcagccccccgcccggccagccgccccgtccgggagggaggtggggggttcagcccccccgcccggccagccgccccgtccgggagggaggtgggggggtcagccccccgcccggccagccgccctgtccgggagggaggtggggggttcagcccccccgcccggccagccgccccttccgggagggaggtgggggtgtgagccccccgcccggccagccgccccgtccgggagggaggtggggggggtcagccccccacccggccagccgccccgcccgggagggaggtgggggggtcagccccccacccggccagccgcccggtctgggaggtgaggggcgcctctgcccggccgcccctactgggaagtgaggagcccctctgcccagccaccaccccgtctgggaggtgtacccaacagctcattgagaacgggccatgatgacagtggcggttttgtggaatagaaaggaggtaaaggcggggaaaggattgagaaatcggatggttgccatgtctgtgtagaaagaggtagacacgggagacttttcattttgttctgtactaagaaaaattcttctgccttgtgatcctgttgatcggtgaccttacccccaaccctgtgctctctgaaacatgtgctgtgtccactcagggttaaatggattaagggtggtgcaagatgtgctttgttaaacagatgcttgaaggcagcatgctcgttaagagtcatcaccactccctaatctcaagtacccagggacacaaacactgcggaaggccgcagggtcctctgcataggaaaaccagagacctttgttcacttgtttatctgctgac

SEQ ID NO: 42685 - DNA, 1459 bp, Artificial sequence
  DNA replication origin
tggccacgaaggcgaagggaggccgcgaaggagaggccgctgggactggccacacacagggacgggggtcctggggatggacagtcagcgagggaagggggtcggagcttccgcggtctcgggaggggaagggggagccgacacgggaaaagggggtggtgcggggacccgagggtggaggcggatgggcgtgtgtgcagcgctgagggcagggatttaacgcagctcttcgagatgacccaaagaccacggtgggggctgcacagacgggacggggctaccgatgcaggaggagaactgcccaggggaaagtgggacctacaaggattagagaagggtggcgggggcggcctcggactcggcaggaaggcgccaccaccgccctctgcccgtccccagcgtgccccgccccgtccgggggccctaagggcagcggcctgggccgtgggggagccgagccagggcggaaccattcggaacagagaggggggcttggggggaagggaggagccaggggtcagaaccctgttgggggcgggggggcgccacaccctgggaaaaaggcttgggcacatccagagtggaccaatcagcgagcaaggccagggtggcgtcaaggggcagcttcggccaatgggaagggagaacacttcggaggttcggaggaagaaaagaaaaaaaagccccacgaaacaacaatcgaatctgtttgggggcttggaaggctgggaatgggcgtcgtttatagcacgctctggcacctgccttctcctttgaaggatggggtggcttgcatcactcctgggtagtggggagcaaacggagctgaagagggtccggggaaagtagacggggattggccatttaccggggacacttgattgggcgcctcaatttggggggtgggtgggacggaggtagcagctttgtgctcaaaagagtgcaagagaatgttgtggtctcttaaacggaggcaggagtgggcagggctcccgcatcccctaccactggctactgacttaagtgtcaaccagcgagtggatcgtggataatctcaagccaatggatacttaagcatgccttttgggcactgaacactgctcaacatactcatttcccttaccttcccagtcccaggttgtttcttaagaggatgagcaatagtagggggccacaggggaccccactggggaattcatataaatttatcctttggcttttcacttcagtttaatgtgtaacactagatgcacgctctattctgaaaattttctcttataaagataactgggactagctaccattgaggtctaaacgttttggaactgatttggagagtggtgtgctcagaaggccgtatctgttggggggattgcaaaagaaaacttggagtggtacagcttttggcccagggattccaaatgtcttgaaaacccctgaaactgtatgtaaaatgcca

SEQ ID NO: 42686 - DNA, 1045 bp, Artificial sequence
  DNA replication origin
ctcccgggccgccagcccgcctgtccgcgaggtgcctgcggccacggggcgccgaggctccccgaggacgggctgcgggctgcgcgctgcgctgggccgggccgctgcagggcctcggcgagcgagcgagcggagcggggcggcgggagtgcgtgtgtggggagaccgcgcgggaacgcgagccgccggcccgggaagggtgggtcggggagcggcggctgccgcaggaggagcgacccgggaaccggaggccggccgggctggcgggcaggagccgcgggggggagggcggagcgcggagggcggagacggggccgcggaagggagggggccgcggggcgcggccgcggggcggggcgctgggacctggggaagataagagcgtgctcgggggagtgagggcgggagcgagggaggggcgggggacttagagaccaaagaggagacaaaaggacggggtgggtgggaggggcatagacgagcgggggtaggggaggggcgccgggggacgcctcgcggggaggggtgtgtgtgtaccgcgggggggcatagtgtgggagggacttagagagggacaagaagggacaacataagggagcgcgggggtacggagaaaaggggggcgggagtgctccaccacgctggccacgaaggcgaagggaggccgcgaaggagaggccgctgggactggccacacacagggacgggggtcctggggatggacagtcagcgagggaagggggtcggagcttccgcggtctcgggaggggaagggggagccgacacgggaaaagggggtggtgcggggacccgagggtggaggcggatgggcgtgtgtgcagcgctgagggcagggatttaacgcagctcttcgagatgacccaaagaccacggtgggggctgcacagacgggacggggctaccgatgcaggaggagaactgcccaggggaaagtgggacctacaaggattagagaagggtggcgggggcggcctcggactcggcaggaaggcgccaccaccgccctctgcccgtccccagcgtg

SEQ ID NO: 42687 - DNA, 952 bp, Artificial sequence
  DNA replication origin
ctccgccctcccccccgcggctcctgcccgccagcccggccggcctccggttcccgggtcgctcctcctgcggcagccgccgctccccgacccacccttcccgggccggcggctcgcgttcccgcgcggtctccccacacacgcactcccgccgccccgctccgctcgctcgctcgccgaggccctgcagcggcccggcccagcgcagcgcgcagcccgcagcccgtcctcggggagcctcggcgccccgtggccgcaggcacctcgcggacaggcgggctggcggcccgggagcgcgaacccgagccgggctgggtgtccctcgcccagcctggccctcggaagcctcgcggggcgcaggggcccgtcggaaatgtttgggggacgggccggccgcggttcctcccgcagcccaggccgggccggcgcgtcccggggagtcgccgcgaccttatctccgaggatgacttgatccggagcctcctcccggctcccgccccaaacctgtgccaccaacgcgcgaagcgcagctgagactcgcggctggcgggaggagggcgggggactgtcctgaaaatgcccaagccgtgagggatcctaagccgaccgtcagacccggagaggcgaggtctagtgacacgtccctgccacccagggaaagagggcgagcccacgccaagcgccacggatccctgcctctccgcccagggttctccccactacgcattgcagagcccttggatagacctcgccggacccagagtgagggacgtggctcaagtcgacagaacacccagccacccacccacatgccaatagacacttttaaaaagtctgatcgggtcgggctcggtggctcacgcctgtactcccaacactttgggaggtcgaggtgggcgggtcacgggaggtcaggagttcgagaccaccctgaccaacatggcgaaacccc

SEQ ID NO: 42688 - DNA, 1546 bp, Artificial sequence
  DNA replication origin
agcatttaaacaaaacaaaacaaaactgttgagcctggcaaagtgacactgtgtttactgtttttctcccagtgttaattgtgagcattttccaaatatgtattttgatgtgctaacagtccctaaagaggactgtagaacagtttagcaatcttctcatgcagctccagccccactccccataatctccttggtgagggggagaagtcttggctaggatggggaagagggatggtgactatctcagtctgattagggggcaggggaactgggctgggaaggcgactctgtccttggaggctaagtcccagagtatcctcgcttcacgcttggggagggaatttggtatttctttccaggacaataagaacatctgtgccaaggcagaggaggaggccgggcgctccgaggcatctctgccggagtctcttgacactgtccgattgttactatttcagtttctgcttggatcactgaccttgtccatttagagcaggctgacttgggcgaagacagtgtagggctgaggaaggacagagaggacccgtctggctgggggtggaggtgtgaggtgggcagggagctggaccaactctaaagcgaccaggttacaaatgagctgcaaagtacagggtgaatcttgcatccgtaaatgggaggaaggagtgcttccactgtccaccccccaccccccggcccctggggtaagtgctgttgacctcaggtccagtttgtttgcagcctccctcttctgacagatcgggcttcaggtcgaccttggggtaatggatgaagaactacaggtttgatccttacacgggacagtttgcttcacactgagaaaaacctggctactttctgcctcccagctccagttgcaaactggagttaaagtcgagtttctggctccctgcaaagtattcctagtactagaaagtcacgtcacccggtgtgttcgtgtggtgactgcagccatatctagtcccagcgagtcggcctcccattagggatgagctaagacagctccttcgtttcttcctcactcagacttagccctggaactggcagttctggggaccaagaggtaggcatctgcctcctgcataattagttacatcagtctcaaaaagcattgatggcccatccctttgggtatcatgctgtgcctggcacgagctagtaatccccacccggtcctggccctcccgagtttacaaccttaagtcacacaatgacacagatcccaaaggcgagcagttaacaaatacatccacttgtccaccaatcacaagggatccattgagtgagccactgcaacaaacaggaaccccttcaaagagcttccagtctggtgggtaagtaggtaagactgagtgagggcttgggagaagaggttcgggcgaggaaacacggtcaacttgggcatcatcgaagactttttattctttttttttttttttttttttgagacagagtctcactctgttgcccaggctggagtgcagtggcgcgattttggctcactggaacctacacctcctgggtt

SEQ ID NO: 42689 - DNA, 1180 bp, Artificial sequence
  DNA replication origin
ggcctgtcttttaggactcccggccccacgactaggaccgtcccaaacttcctgtttcttccggccgctctgaccccggggctgcggctccgagatagctcagggcctggaagtgcatgctgggtaagcgcagacggacggagtaggcgagctgctcgctgtcgccgcggcgcagggccggtgtgggcgcgcgcgctcggcttccttccccggcggtcacgctttgcatgtgggatgggcagcgggcaggtggcaaggaggcccccacgccgagggctcggggaggagccggggcctgggcaggggcggagggggagggggaggaggcggcccgaggggcgggggcgggggccgggagttgctgcattttaaagggaagcggagttgccttcgtcggaggccgaagttcgagccggcctcgccgcgtcgagtgcaggaaatcctggaggggcagcgcagcctgctcggcccccggcccagacccgagctctcgcgccccgctgaagccccaggggatagttgaggacgagtagaaggaagtccttctttactcagactagagaaaacttaaggaaactgttaaccccctccccaaagggggtccaggtttgggatttttttttttaagtgcaggcaaatgctcgactccagggagaaactaaagcgatcccaatcgttgaggggtgcaggtcggaaaggacagcccattcctcagtacctggtccttaagatcggctgcataaggttgcgggggtgggggggaggtggggagggaacccattgctgctacttagctcccgcttcaacgttagagaggagaagctttggaaagatggttaaatccaggaaggtggttaaatccgaatagaggtttaacccctaccttttcccgcaccttcctttggggccacaccccttgcgcgaaaccccatctcgcttccactccttccatctctcattattccgtactcttcagctctgccacatgtttgcgttgtatcttaaggaaattggtcttatgccctcgcatgggggttgatgttagacataggaccaggcgagatgggagatagagcacacagcacactcgggcccacttcagagattactgcccccattctgaagatgaaagaaaccgaggctgcccagagagcccaatattttgctgagctcacacagg

SEQ ID NO: 42690 - DNA, 940 bp, Artificial sequence
  DNA replication origin
ggctccccctgccagtcccggggaagccggaacctcgccgggcagccgcagaccccgcactggccacgggggaagaacggagccaccttcctcggccagcccctggctccaggaaggggggggtcgagcaacgcgccgttcgggtcggagagcgaaagatttcgctcctgctctgtgtgactctcatccccgttttagcctcagtgtatgttgtgggggggcaaagggtcttgcatgcggtgggggagacctccccgccggatgccccgcccctcccccggccccccacttccccaccctgggcgacctcagtgcgtggttctggcgctcaagctccgaggccgcccgcgggcgcagccccagccccggcgccgaagtgggacaggtgctggggaaaggaaaatgccagggctcgccgccttgcctctcgtctccagggcggcccacccttggtggcaacctcccccggctgcaaaccccctgggccaccctcagtgggtaacaccacctgggcgtggaggcatctggggatggaggcgggggggtaggggtcggtggcgagagacccgagtgaggaagaaggaggaaggggatgaaaggtctgtgtaaagtgggaagcctgcacgattcagagccaaaagcccagctctagaggactcggcttctgccggctttccttgggctcctcagtcaccaatccgagctcccttgacccttaccctttaccctaacgactctctgcctggccaaaggaataaaccgtcgtgtgtgtttacatcccaggccatccctgggactgaagggctgagaagcttgcggtccacattcgaactctcatgactttacattgactccgaggagagcagctagcagctagcagcttgcgaaggagctgaagctgccggccgatttgctctcagtcttagggtgtttcttagca

SEQ ID NO: 42691 - DNA, 1364 bp, Artificial sequence
  DNA replication origin
gcccgcttccccggcggcgtggagaagagcaaagttgcgacagcggccgggggctctgcccaggtaaagggggcgccgtgaggcgggggtggtgggggaacggtgcggccctgcggcgggggcggggggaggataaagaaacttgcttcccgcggcccccaccccgcgtgggttccgatcttgcgtggaacgagcccgcgtggcgagtcgcggcaacactgccgggaccgaggccggcacctggacccggacccggaccgcgcgcttgggccggctcggcgggcgcaggcagcgggccaggccagcacccaggcaagggcggggtgggtggccgtacaccggaccgaatcggggactccggtggcgtgggcgcgggccgaaccccgaccgggccgagttgggtggcgaagtaggacgtggattcgggggcggggcgcggcgggagggggaaaccaggcctggccagactggcctgggcgtgggggcggggggcgagttcggggcacttgctgggctctggaccgagcggtagggcggggcggcgctaggggctgggccggacccgcagggagagggcgaggggagggagagccgggggtggagtaggggcgtggagttgtgagcggggtctggcctcggccgggggcgaaggtagatcggcggggccgcgagcggagggagggaggcccgcggcggcgcggcggcagcgaaggccagcttccgcggagtttgtgcccgggcttcccgggctctggccgcctcacgcgcacaaatggggctaggggactgagtggtaagcaactccgagtgttagacggtgatcgggcggcgattccgggaaaagcgaggaaagacacagtctgcgattgtgccgcaccccccacccacctcttagcatctggattctgctctcgtagtgggggccgcggaccctccccgccacagtccttttactctccagcactcccaccgccttcccccttcttcagccatctgactctcctaggggtatgtgtttttgggggtggacggcgacgggggtgggggatactttccttcccgtggcggcaacctagttcgtatcttattcctacaaggtagcgtcgcttcgagtcgcatggacattggggtttagataatttaccccccacccaagcgatttaatggcttttaagcaaaaggcgaatacctggatttccatgggagggatgaggtttgaagattgggattcacccctagctcacttccactaccaacccctctttcttgtgagccacttccacgggtattcaaatctgggggggaggggggacgggagtattaatatgcttctctatttctacacagggtcggcgtggcgaagg

SEQ ID NO: 42692 - DNA, 1245 bp, Artificial sequence
  DNA replication origin
tcatcttccttcaatttaagccccctccccgccgcgcccggcccggcggcccccgcccctagagcgagggcagcggagccagggcgctccgaagtcatcccccgccttttttccagggactcggataattgcccctgcccccatcacagcactcccactcccgaacccaggccccgccgccacctaggggtaccccttaccctacgattcccgcaccccagcgccgggaagaaagcagccctgaagagcacccgtcgcacctcccctctgaggttggagggcattttctcccggtctcttcaacacttcatcacggacaccccccccccccaaaaaaaagccttttctcgccctgccctgctagccagcctcccttcggatcgtcggatccttggatcgggggttggagtcaggtagttaacaagaccatagcctccacctccctttccgaggagtggggtaattcctatggtttcccccccaggatcaaccgacccccgtttccatggagacccccgcccagccgggaagaagactctcttggatcgtggcgaacgagtctcacctggctaagagagaagggggtcgagaagggggtagggcaagtcaggggatggggtacgaaggtgggaagtggaagggagctgtcccgaagggaggggcgaagacatacccagctccagggagcgctacgtccggggacacgaagaggacggcgcccccggggggcaagccgagcggccgcagggaaaagaaggaacagggttggagaaaggcttaagatagaaagaagcgggtggggggatacgaaaaagccggggagtcaaaaggggtggagggattgggggagagagaaaaaagacgcacctgttcccgggtcggctccgcggggaggctcaggccgccacccgggctccctcttactccctcttaaccgccacccgcctaatactgccccgatctgatgcccccctccgccccttatcgccaccgacctccttctcctctctctcggcggcggcggcggtcggactctaggaactgagaggaagaagggagggctcagcaaagcggaggagagacagagccacacactggcagcagccgcggcgagcgaaagagtgagggggagagcggtgtgtgtgtgtgtctgtgtgcgagcgaagcctggtggagtgggtgccggtcgcagggctcgacgggaagtggagtccggctgggtccgcgggcggcgccaacccccgc

SEQ ID NO: 42693 - DNA, 1167 bp, Artificial sequence
  DNA replication origin
gagggaggctccggttacggggccgggtttcgggatcaggggcaatcccccggcccttggagaaggagggagagggatggccgcgaaccccagggctcccccaccccgggtcctaaggggcgtgagggacggacagcaggcccagcggagctggattcgagcggatcgcggccggggagtgggagggcttagtggtgggcttcggggggagcagtccggcggcggggcgggcgggcggggcgtggggctccggcgggcggcggggcggggccgggggcggcgctgctgccgccgccgctgccgccgccgccgctgctgctcctgctggggccgccgcagccgttgccgccgccgccgccgccgcttctgggcggggaacggaggccaaagagagtcccgtgccggggcagagggcgcaggcggcgcgcggtggggagggggccgtcctgggggcgggggcaggcgggggggtggagcccccgacggggggcggtacgagccgggacgacgacgacgaggagccccgggggccgggtgcatggaggacgaggtgctgggagaaggaaggggggtgtgggtcccgcgactggcctcgtgggcttggctcctcgaggttcggtttcgggacagagccctgcaggggcgccaagaggccggggaagggatagggaggtgaactggtcggtggagggggccctcctcgccggggtcccgccgagaggaaggctgggccagagggacgtccggggcaaggctgggaggagccggccgcacctcggctggggatttcgcgttatggaggtgcgggagattgttgtagggaaagacgtggtcgaggggaaaggtgggagggaaacactgcaaacccgggaggccaacagcacaggcccgtgggggtgcccttctattccgctcgcacctcctccctccctgagtggaagcactatgtttttgttttattgttttgaaattttcaatgttggctgatcgaaactgtcgatggggtgatattcattcttggtgtctcctggagtagacagtaaagacaggcatcctttggcgagcaagcatctagcccagggtttagaggctctttacgttagtgtgggaagggggcccggtaactttgtgccacagcttgactactgttaaggcagtttggaggtc

SEQ ID NO: 42694 - DNA, 1166 bp, Artificial sequence
  DNA replication origin
tccggggcaaggctgggaggagccggccgcacctcggctggggatttcgcgttatggaggtgcgggagattgttgtagggaaagacgtggtcgaggggaaaggtgggagggaaacactgcaaacccgggaggccaacagcacaggcccgtgggggtgcccttctattccgctcgcacctcctccctccctgagtggaagcactatgtttttgttttattgttttgaaattttcaatgttggctgatcgaaactgtcgatggggtgatattcattcttggtgtctcctggagtagacagtaaagacaggcatcctttggcgagcaagcatctagcccagggtttagaggctctttacgttagtgtgggaagggggcccggtaactttgtgccacagcttgactactgttaaggcagtttggaggtcgtccctgtggtacagaggtggagtacaattgcaaaaatcttcagtaagacttctggagatgagttgtaggttagcgttacagtggttagccctgtggttctttcaacttagaaggctctttctcaaaagcacgccgttgagttacatgggaaaataaatgtggattgcatttggggttgggagtggattaggttgattataaaatttcaaggttggaagggagttttaaggttatttacttttctgttgatatgtcctgtccttgaatgttggaattgagggagctttattttggggaagatggtagatggcacagtggaggatgtctggtgcacagtttagggtactttaattgaatggtgatgtcaccatgtggtactaaagatgacagtatgtaggagagaaatttgggggattccactggggattaaatgggataacctaattttaagaatcatcccggggctccaaatagaagcaaaaggctggggaggagcctgtaaaatttcgatggaggcgaaaagttagtagcaaagattgaggtagctgggaagagcaaggggcttggtgagtcaagttaagagaatctgaaggttgatagtagagtttagggatgtggccatcttgactaagtcatgaggatgttgttaggcggacatcttttgacagggcaacttaggcaactgcccttggggcagatgtgagggatgaaaggtacaggccttggggcacagatcctga

SEQ ID NO: 42695 - DNA, 2170 bp, Artificial sequence
  DNA replication origin
tttttgagatggagttccacccttgttgcccaggctggagtgcaatggtgcgatcttggctcacctcaacctccgcctcccaggttcaagcaattctcctgcctcagcctcccaagtagctgggattataggcatgtgccaccatgcccggctaatttggtattttaatagagatggggtttccccatgttggctatgctgatctcaaactcctgacctcaggtgatctgcccaccttggcctcccgaagtgctgggattacaggtgtgagccaccgtggctggccaaggacgctatttcttaccttaggtagctgattggtgggggagacaaacatgccttgtccccaactaaccaagctagagaggagaataagaaccagtgctgtggaagaggtagggagtaaatacttgaggacaaccagagagggaggggttaactgaactcgggctggggctagggggatgacatgatgacatttaagctgagtcttgagagaagacagggagaggaagagggggaagcaggagaggccatttcagggtgaggaggcagaagagtcctgaaactggatggtgtgtttaggaagggttgggagctgggggtggtgagagtggtggggaaatggcaggatgtggtggaagaggaggctggagaggaggtttgaggccaggtcatgagggccctgaaggcagtgctgagaatggctggctgggtgctagaggccggggaaagctattgaaagcttttgaggagggaaggagtgacatgatcgaactggcgctttagaagatgaattgattgtagaatcaagaaattgaaggcagagggagcagttaagaggtgattataatattctgggtgagagctgatgagggcctgcaccagggtagtggcaagaagggtagaaggcaaggctggagatggcattattaaggcctgacttctgatcgaatatgggcggcaggggagagaaggagttgaagatgacaaggcggaaatttccaggctaggggacggtagtgccgttaagtaagctaggaaacacgctgcttactgggcatagggggtggggagcaggtttatgagaacagataatgagtatggtttgagacacattgagtttgaggggcttggtggtcatccaattaacagcaagttgctggcagctggaaattctggtctgggcctaaggagagaggtcaaggctagagatacagatttgggagtcatcagtgcatcaaggggcgagctgaaactgtggaagctcatgagctgagagagaaggtggggcagggctgacaactggcacagagggagagagatgggtgggggaagccagagagagccagcaaaaggcagactaggaggaaaagagacagagggagaccggggagggaccggaagagggagactgaaggccaaagagtagaggggagggggaggcacaggggagggagaaggggaaggagggggagagggaggagagaatgaatgggagactgagggaaatggggaaggtgagataagcaagaaaaagacagggaaggagagaggtgggaacggggagaaagttggaggagaggggattgtgtgtgtgtgtgagagagaggagaaaggcaagaggtgaacagctgggaaaataataggggagagaaaggtgaggaggaggaagagtaaagagagagagatgggtagggggatgagaaagagggaagaagccttgaaagataggaaggggaggaaatgggagagggtggcagaggtgaagagagacagagatcaagggaaaggccaggccccagtgaatgcccaagtctttggggtgggcagtggaagagaagggccccggagaagccatcaggcagtggatcaggaaagacaagagaagggagagaataaagagggcaacgtatcccactctgcagagatgaggaggaggatgaagcccaggcagggtggatgcctctctcctctcttctcctaccacctccacactggtctcctggctctcccttgatctttgtgggcaacctcctgccttaggactttctcatgcactgttccctcagcctggaatgcttttctcccaaatatccacgtggctactcctttacctcattccgatggtttaaatgtctcctttacagcaaggcctatcctgttcacc

SEQ ID NO: 42696 - DNA, 1689 bp, Artificial sequence
  DNA replication origin
tcttcacccaggtgctcgggtccccattcctcacgatctcgggaaagatgacaaagggcgaggaagtggagcccaggcaggaggtgacattgccaccggcagcctgggttgtgcgctgagacctagacaggactgtggagaggagggccttgctgctggtgtgcacgggggtcaacacaggcatggggggtgtcttgcgctggttcggcaatggaagcttctggcggttggacttggaggacagatcaaggggcatctcgctgcactcaggtggagaggccatctctcgttccagctgtggcggtgacttaagaggagagaaggtaacggaagtcccttctgtttgctgctcggtgccactgggcatcttggcggggtgcggtggggctgagctcccactgggggctggcagcagaggctgtggagttggaagcaccttggcagaagcagtaacaagggaggtatctgccaaaggcccagggaccccatcgggtgcaggctgggtggtggtgctaccggatggggaagtgcaggggagcctgttcacctccagagataccagcttggaatccgaagtcagaggccgggccacagaaaatgcatacgggtaagaacggagctcgggggaggctagcacgcctgggagacacctgtcctgcaggtaggacggcaggacagggagcgtaagagtggaggaaacccctagagtggttggcagtgtggccacactgagtggctgcccacagcttggaggcgggatatataccagcggctggctcggggtcagcactgtccctggctgaaaggacagggggactttttgcatagctggtgcctgagctgcaggaaagcacactctactcaaactgaaggaggccgggatgggtgcagaggtgggaatggcagctggcgtggcagcaggcatgggtgtaggggctggagtaaagatgggggctggggtgggtgcaggcaccggtgtaggagcaaaggcggggatgagggtgggggtagaaggtgggccggaagatggggttggagtgggcatgggcacagacggaggggcaggggccgctggaggcgtggatgctggcatgggagccagaaccggagtggggacgggagcgagaaccaaggtcggagctgaagggggcacaggagcctggatgagagccaagggaggagctgaaactgggactgaaagcggggcaggagctggagccgacaagggaaccgggcctgaagggggagcagaagctggcacaggcaccaagactgaggccgaaacagaaagggggttcgagtcagagatgagcgtgggcactgacggtggcgctggagccagagccgggacaggtgctaagggaggggaaggagctggaaccgaagtggcaacttggactggaacaagccctgaatgggggactggggcagggacggagaggggaacctggaatgcatctggaacagagtggggcacagaggccgaaccgggagcagggggacagataggggctggcagaggactgaagttagtggtaaccaggggcagggtcccctccacagggactccagttcccagagttgccaaaatgaaagtattcttctctccaacaccttgccgagagtccaaagcctttactccggcgggtgagcagtcaacctgtttgctcatttgggtgttgagtggag

SEQ ID NO: 42697 - DNA, 1349 bp, Artificial sequence
  DNA replication origin
agtggtagaagctatgattcttgtgattgctggttccagaatgcaccagtgactgagaggaagaggatgttcgagaggcctgggatgaggccctttgaagctctattctcttagggcttctcactgtggctttcgagtctggagagccctgttagagagtgtagaggcgaagggatctgtgcgtctggctggctggagtccagccgtcctcaggagtgaactctaagctgctgtctttgctcaagcctcagaagcttggctcgacccaggtccaagcatcatcctctttgaaccatagcattaatcttcctcattggccgtcctctccccactttctgatcccaaggccctatgcaatagccacctttgtcagattcccaaacaagcccacagtggttctgaattcaggtcgatcctgtgcttggaacttgcagttaagtcaagaaatctgacatgttgataggttataaagccatgtggtgagtataagaattcaactagtcccaggatgctatgggagctcagaagcatgggcaagggccctgggaacacatcctagaagaggtgatgcctagttgatactttaaaaagtagaaatgcaggaattagaggtggcagggaagagtgtttgaactgagaggacaatctgagcaaaggcttggatacaaggggagttaaaagcaaaaccaaacagcagattgttttattgcttttggggttctttgcccacggcttacctggagtcccactgcccttctgccaggttggaaagatcaaggcaggaagtatgggccgtggcattaaatctacatccccggtcaggattggggtgaggatggcttggtggcctcttattaaatgatctcccagtccttttagtatggtgtagaggaaagagccagcaccactcctaactacctaggctgaccttgggcgagaacctaatctttcccagccttaattgctccatcagccaaatggaggccaatgtacccacctactgacagagcatcacactgaggaccataaagatctgtttagccaaaattagttcctccttcatgccgagctcacgaacctatggttaatgagggtcttatcagaacgctctttgggcttgaaagagaggctctgttcaagtcttggtgggaggagggatagtctccgcatccctatttggggtaggtggggttgggggcggtggtgaatggggcagtaaactcctgctcggtccatactctaacccaataaccgggaggcctggtgggtgtttaactgtgtcctgcccatgcaaagaccagtgtgtgtgtgtttgggaagggtggggtccgccccaggggcgtctgctc

SEQ ID NO: 42698 - DNA, 981 bp, Artificial sequence
  DNA replication origin
ggctgtctggggcgcctcgatcgctctcccgcttcacggtagaaggcggcggcgcgcgaggggaggggagggcaggccgggtgactgcgactccgcgtgctcacctgctggtccgcgaggctgagggagggggcgccgggggcggggccagagcgcggctggccaatgggggagcgcattcggcggccggctaaattccccctggaaagtgaagggggctggggtcgaggggaaagttcgaagctccggagcagcggagggctttggtggcggccagaaccatccggggacagttgcaggcgcaggggcaagatcgggggaccggaagacgccagccgcggccgcggccgcctccgccagggacggtaggcccaaccctggctgcccctcccttcccgggccccgccgggccactctcccgccatcgctggctcgacagcgccacctgctggacgtcggcctccacgtccggcgcgccggggcccgaagttctcggaggctgggacctcagtctgggaggggaaggagctcactcaccccaggtccagcggcttcagagctggaggcaactgcctcttttggagtacaagatgggatcagaaaggcctgtgaccgtcagaataacttcttgtcccgccccacccaccggagctgacacttccaccgcacagccccacccaggggtgaggaaatagtggcgaggcagtccctggaagcgggcagcagcaaagggcgggagttcgggagttgcacgtggcacctggtgacagcaacgcacagctggcaagcagccctgggctcctcatggaccctgtgatccggggatgtctgttaacactccaggggcaaaggaagtagccgcctgcagtgttataggagcgggcagaaagctgccttagctcccaagtgtggattgtcctcctccctctcctcttgcctgccatagcatagggcagaagtctcagaattaaaatcaggacc

SEQ ID NO: 42699 - DNA, 1304 bp, Artificial sequence
  DNA replication origin
catacatgatgcaaggtgctaaggtttcatcaatgtccaacacagttgttgctgccctcaaggaagcccctgtcttatgggggaggtaaggaaggtacataaaagtagcccaggcagacagcaccagcagtgaactcgcaaacatgaaatcctgatctggaaagaagagatgagcaagcccgaagggaagggctacagcgagtgaccttgggggaagggacacacacaggagtttcatgtttagacaaagtgggattaggtgaaagtgatcacctttaatttgattagtatgagaatgtttcctgggggcaggcagaaggcctgtgggagggcgggagctgctgtggaatgcaagccttggggcgcttaggctgggggggcaggggggacagaccttccaagcataaatggccttgggaggcttcacagaccagtggagaatgggtcgcaggcagggtctggtgggggtggggtggtggtgggaggagtgaacctggggcaagggctgcagtttcccaggcgcctcctcccagtactcagcctctcactcgtccaaagggaaattcagacctgagaggttgagttgagcgacttctcccgactttttgttggggtgggtggaaaggtgtgggggtgagggtgagggtgggggtggggcaaaggcacggccagccctgtgggctaacggaaaggaagtaggagaggcctgggtgtctcctgtgggggagagcggtcatcagggaggtcaccgtggtccccctccctttcctcccctttgcccctctctgaagttcctcatttctttccgggccaggataaggtttgcccaccccggcactgccaagggagtgtcaaggaggtggagtgcagtgtgtggcttctgctatggtgcatggacacacccacacgcacatccacacactcagaaccgagcccaggggaccaaagacgtggcgcctggaagtggagaagctccagtgatggggtggaggagcagagctggctggcgaggagggaggtgggagggctggggctgtgggaggcaggcctgggtgtgaccacccacaacacgcagatgaggcgcccgggcactgacagccctgaggagtggcgacagggggaacaaatgcaggcccggacgccatgtgacaccgtgagcgctgagggcacgtggggcgagaggaggtgtgtttgggctgcggcagacacagaagatttcctggaaaaggggcctgagccagccccagaggatggggaaggttccgcctgcccctcctccagtcggggctctcctcaccagttcc

SEQ ID NO: 42700 - DNA, 864 bp, Artificial sequence
  DNA replication origin
cccccccagcctaagcgccccaaggcttgcattccacagcagctcccgccctcccacaggccttctgcctgcccccaggaaacattctcatactaatcaaattaaaggtgatcactttcacctaatcccactttgtctaaacatgaaactcctgtgtgtgtcccttcccccaaggtcactcgctgtagcccttcccttcgggcttgctcatctcttctttccagatcaggatttcatgtttgcgagttcactgctggtgctgtctgcctgggctacttttatgtaccttccttacctcccccataagacaggggcttccttgagggcagcaacaactgtgttggacattgatgaaaccttagcaccttgcatcatgtatggcatgtaacagacactcaatttgtgtttgtggaatgaatgaagggatgaatgggtggatgggtgggtgggtggatggctggatggatggctggatggatggatggatggatggatggatggatggatggatagattggtggtatgggtcagtcagcatctgtgaggtgtgttttctgggcaacgtttatctgtatacggtggatgcgggtaggtgtcacgtactctgccttacacgagaatgagcaaaatgtgcataccttctggggtgacctctgtatgtttttgcattgtcatttacccaggtgcgctatttgcgttggttgtgggtgtgcaagcgcactgtaggtatatgtgtgtgcagggtgtgtgcatgtgtcccaagcgtggagacgtgtgcacgagagcctctgtgtgtcaaagggctgccctggtctggccagcaaagccgcaagctcagttgtcagttcctcctccgggccagcc

SEQ ID NO: 42701 - DNA, 1855 bp, Artificial sequence
  DNA replication origin
cggggaggagggcgggggacggcggccccggcggccgcggggaccgaccgggcgccgcgctcaacttccacttctcctttcgccggcgccgagttcctggcgccgctcgcccggcccggcttccgaggggagaggacgggctggcggggctggggacccgcgtctcggcccccggagcggggaccacggagacagaccccggcccggcgaccgagctgggcccgtgagccactcggcctcaggtacgtcgatggcgccggttcttcgagccttgggggacgtggaaaagtttgcttgagggcggaatcgagagcgccggggccccggcgtggggctgggggcccagggaagggcgggagagtcgcggagtgtcgcgagccgccctggagtcgccccgccgcgcgtgtgatggagaacccgggctcccgatcccgggatggaagtggaatggattccccgagtcggggagtcggggtaggggcccctgttttccctcgcccccggcagcctgggttccgtgacggggccgatcatgacagcgggcccccagaagctgggcgcccgagggcagaggaggtggggcggaccgcggcggagctgctagatggatccgactgcccccggggcttctggggccagggctttagggtcacacgcacacacgcgcacgcagacctatgatgtggagaactggatcgccaaaatagagacctcttggcaggggccggagtttccgtgtgagccagccgccagccttcccgctcccgcgttcccgctctccccgactctcccgcctccgggttccctcctgggccgccgcctaggggattcagcagccgcaccgtgcggggtcccctcacgccagcgccttgctttggaggcttgagggactgctgaggcggtgaccgctttatgaattcctggctcctccaccgcaccctaaccctgactcccttttctcaccaccgtatgcctgcacatcaccttcctgaccagagtcacctcctgaccccttggcacctcggctcagcgaggtcctcctgggccgcccccgccccgcaccataccccagctgagggatttgatggccatttgattcctgcccctcatccctcggcctgtgatagaggcctgtctggtcctgcagcctcttctggttaatgtttgacagttcattgtggctaattattttaattagctcttaaagtgggaaagaacagttaaccttggacttctcgattttggcctggtggggcctcaaatgggaggagtgctggggaggtggggaggtaggagcggaagtgaggtcaccaccccagggcctgaaccaccactgctcagccccaacagctggtgggcacgcccattggggactcaccccctgccagctgacccctggcccgagtgccaggttggaggtgggtgaagggaacagttctagctcttccctttggggagactttggcactgaaaatgcccggggaacacatatgcccagcaagaatgccagtccttccttgcagttagttacactgggttttcctggttataaagtgctttctcaaccattaattcagattcagtgcatccagtacaggagcagcgtagggggagctctctggagttcagtgaagattatcagggaggacttcctatcccagccagctggtgtgaggaagaggctaccttgcatctggttgtttttggggctggattcagagcctgggatctcttgttgggggcaggggtgggggggaccatgaagcaggctccatgctaccaccctcacccagcctcttgctgtgagccgaaggagtggcttgtttgcaactatgtctggcattcctccctgtgc

SEQ ID NO: 42702 - DNA, 1603 bp, Artificial sequence
  DNA replication origin
catgcaccgaaacgagcgagcgaaaggggaaatgcagtagagacacacacgtccccgcaggcggcggatggggcgggcgcgaaggaggcagggcgggagggagggaagagccggagggagggaccgacgggagggactgcgggcgggcggggtgggggagggaacgagggagggacgaggcatctcggtggaaacagcgcccgtccgccccggcccgcccgccgcggtcgccagcacggcatggggagccgtgccaggggcccgcgcggcctctcattcccctcgcggctcgctcgcgcccgggggaccacgaggcagggcgcccgcagagcccgcgtcgtgcgccgcggcccgggcgggcgctccccactctgcttctagccagcgagactccgagctctctgctcgttccgcgcccttcccggtgcgaagcccccatacaacgccccgcagagaaatcccttccccgcggactcgggaaggtttcgtccagccccctcggcccgtgcaagtggagacttgcttgacgcctttgggccaagccctgcgctccacattattgagctcctggggtgtgcaggccccagcgggagggcgggccgtgcggcgggtgaggccgcgagatgcccagaggatacaattttggaaccatatgcccgactccgcagaatcctgggcgtaacacctggggtgactggagagtttcggcgacttcttagggaagtcgagtctaggactcctgcgggaagttggggtgggggacgctggcaagatatgagtcaggggaagggctagggggagaggggctggcccagcaagtgcaaagagagccagagttcgggtgctggaagaaagcccatgcctacctttcttcccctgtccaaagccaggctgctctgctccacgcgcccacttgaaagccactcaggcacgctccccttctatctcccctttgccctctctgacctgcctcaacatcaataccgccgcctacgtgggtctgctgataggaggctctggagagagtgcgctgggaattgttactctgtatagttccacgtggcctttttgggggtgggggcagcaaggcctaagccttggcagaaagcatcaagactgaaggagccccaggggatggggccttctaaagggcttgaggttgaaggacctactcagcctccagcatcggcctgcttctcctgccttgggaaaggatcatctcaggcgcaggactgggggacaggagtggtggtggatgatggccacaaaggcagctgcagattacaagttcccaaggaaagatcctgtggctggactggggcgccggcccctgagacctcctggatactcagaatcaagtccccaaaacaagcactttgtcttttccaagcgggcatgcttttcccaggggattccagatcctggagacacacagttctctgctggcctctcatccacgaggtcccctctcaaatttggggtaggttccggatgtccctaagccctctttaccttgactttgaaattcacgaatggacagacacgtctgcacacgcgtgcacacacacacactttcccattttgctaagagctcagtggtctg

SEQ ID NO: 42703 - DNA, 1534 bp, Artificial sequence
  DNA replication origin
gaggggaagtttcaaagggtgtgccggggaccggggaagagtctcattctcatgagtcagcggatccggcccagtgtgacttcactgcttccccagaagaggcgcccagggcaggaggccgctcagagcgcagcagcaggagtggaagctcggggcgctggctgcctgcgccgggcagggcgcgggacaaggcttggggctgggctggtcaggccgcttggggctgaggcggcgaagggaggccgcgtgccagcgaggaaagctgggggcagaggagccgatatctcctcctcctgctgctcctccttggacgacagttcccgccgccgccgccgcgttccgcgtgcaggtggcgctgcagaggcgcccgggcgcactgctgggcgggtgggcacgctcagccccaccaggatccgggcttggaaggcgcgcgagcctagaaagggggtagcgagaaaaaggccaccagcccccgctgcttctcaggccgtccccgaactcgagagaaggacgcgctcccaccccactggcgggagagtacggagatcagccccgcggccgagcgccccaggtcgggggctggttcctgcgcgcttctgcaaagtccctcgagccacctcgcaggccccacagagccccgggcggctcctaacttcagcaaaggaattgcagtttcgggcggtctttgctctctggggatggcgctcttgacccgcaggcagtagaatggaaactttgagtcgtgtctggggcgttgggggtgggtttccctgaacagccactctctagcctggctcccatgagacttagaacgcatctccagcacaggggatgcagactgtggccaaggctggggcgcagcctgagactcggctcggccgacatgagaggtagaggctctgcttaagtccggatctagagggacagttaggtggtccgtgcttgtcaatccggtcttctgcagctatataaggaaaaaagaaaaaaaaacaaaaaacaaaaaaacaaaacaaaaaactaagggcttatctggggctcaaacttgcaacctctgtcttcatagatagaacttcgtgtcctaactccttgcaggccctgagctctagaagccatgatgctgccttggacatcctcgtggtgcttggtggttatgaggtggctgtttagttaacatattgagaatatcaaggcacaaaaataaccttgtggccagaacctgtggggaaaagttgttgagggctccaacctcgccctttccagaagctagagtggccacttctgtgatacaacttgacatataaaatctatgggcagagtgtgtccctcttttctgtgccaagaaataaaagctgcaccccgtgttagcattctgggtgcctctcctcccctctcagtccatccagttctcctgctttcagggtgtgcaaaaccatctgagaaagtcatctaaagacttcccataaagaaagggaaggggcggggggaatccaaaggatcctaaacgttcccaggtctcactgtgtgccaggagaaa

SEQ ID NO: 42704 - DNA, 1621 bp, Artificial sequence
  DNA replication origin
ctaccgcgctgctccagccgccgccgcgcctcggcccacaccctcccctgcctgcattcccgggacggacccgagggaagaagcctcaggaggaaagagacggggtggggacagcggcacacgccaccccgggatagacttctttctccttgcccccgtttatgttataggtttcgggctccccacccccactggctcgagcgcacggggtcagcgggcagggagcacagctggggaggacaaagagctgcaccttaagacatcactggatcacttcggcctccctggagcaacgcaactctgcggggatggggtgggggcggaggcacctctttcacctcgggagcagcgggcagctgagccgcgccttcccggtccccgctaccccgtcccctctacccccaccctctacccgacccgcgccttgggataaagggatgctctgtcttaatgagtgagcaggtgcactcgcgggccccaggcagcctgggaggccgctgccaagacacgcagtgggttgtccggggcctgtacagctgagaggagggagccagcgggcacgcgtgtgcgtgtgtagggggtgtaactgtttctgttacagacttgccagatgtaggggggcgcgtaccaggcgccaacatccccttatcacaccacgcgcacccatcctctgaatgttcaggagagcggctcctattggctgccgcagtcggttgtgtttggctggccaatggggaaggcccgccgcgggagagggccacacagaggctaggagaagggggggaagctagtggtggcagttccagcaaaaggggactttgtttacggggctagccattactggcccaggtggaggatcttgggacaatggcataagctccacagtgccttccattcccaagccctccatataaccataagtccctccagaacgctggagtttcagagggagttgggaatccctaggagggttcacctccccctgcagctgaatgtagaacaaagtggttgggtctaatttgccagaagcctagattatgcttggaagatgataaatgaacacaacctccttacagtattagggggctgctgcccaaagcttactaatcatcacacacatcttggtcaagaccagtattccttctccctaaagtcattcgcgggttcagaatttgtttgaaatcgactttactgggggtacaatttacatacgataaagtgcacccatttgtttcttttaagactttacctctccccctacatatttcataagctaaggtaacactgacacatgtcactagcactgactcgtgagttattgctaatgccatcaaggtcagggattcaaacagcacagttgagctgccatcttatttgggaggttgagctgcaggaagagacaaacatgaccaaatccatttctgctgagagaaaaacaattcagtgcatcagtgatatacctgaaagcaaattggaatgtgactactcaaggacgtccaagttactcagaatggcatcttccagttaataagtttattagctgagctagcagatatatttacagctaacccttttatcatatatgtgggtcgcccatttctaaaaccctacattatactac

SEQ ID NO: 42705 - DNA, 1026 bp, Artificial sequence
  DNA replication origin
ctcccgggtcccacccttcctggacctgaccccctggatcaccttgatcttctcgccctcgatttccacggtcttctccctgaagtccacgccgatggtggcttcagtcttgtctgggaaggtacccccgcagaagcggaaggtcaggcaggtcttgcccacgttggagtccccaatcacgattattttgaagatgcgaatctgcacgtactggtccagcgacgagtcgagctccagggacgccaggccagcggccgaggcgggctgcaggctcccatggcccaggatgggctgcgccatctcccccggaccgaaccggggccccaaccccccttgagggctccacacaaagagaacgtccacgttcgtgcgctcgaggcgagcgagctctgtgcgtgtgtgtgtgcgcgcgtgtgtgtgtgtccgcccgtgtgtgcgtgcgccggcaccgtgtgcgcgcgcgcgcgtgaagggggtgcctctcactccgggcccccctcctcctcctccagcgcaccctccttgcagctcggaggcaccaacacaaaagccagggagaggaggagagagggaggagagtggacgagccgcgagccttctgcctgtgtgcgccctcggaccggatgctctggcgaaggaccctaccgcgctgctccagccgccgccgcgcctcggcccacaccctcccctgcctgcattcccgggacggacccgagggaagaagcctcaggaggaaagagacggggtggggacagcggcacacgccaccccgggatagacttctttctccttgcccccgtttatgttataggtttcgggctccccacccccactggctcgagcgcacggggtcagcgggcagggagcacagctggggaggacaaagagctgcaccttaagacatcactggatcacttcggcctccctggagcaacgcaactctgcggggatggggtgggggcggaggcacctctttcacctcgggagcagcgggcagctgagccgcgccttcccggtccccgctac

SEQ ID NO: 42706 - DNA, 875 bp, Artificial sequence
  DNA replication origin
ctcctgaggcttcttccctcgggtccgtcccgggaatgcaggcaggggagggtgtgggccgaggcgcggcggcggctggagcagcgcggtagggtccttcgccagagcatccggtccgagggcgcacacaggcagaaggctcgcggctcgtccactctcctccctctctcctcctctccctggcttttgtgttggtgcctccgagctgcaaggagggtgcgctggaggaggaggaggggggcccggagtgagaggcacccccttcacgcgcgcgcgcgcacacggtgccggcgcacgcacacacgggcggacacacacacacgcgcgcacacacacacgcacagagctcgctcgcctcgagcgcacgaacgtggacgttctctttgtgtggagccctcaaggggggttggggccccggttcggtccgggggagatggcgcagcccatcctgggccatgggagcctgcagcccgcctcggccgctggcctggcgtccctggagctcgactcgtcgctggaccagtacgtgcagattcgcatcttcaaaataatcgtgattggggactccaacgtgggcaagacctgcctgaccttccgcttctgcgggggtaccttcccagacaagactgaagccaccatcggcgtggacttcagggagaagaccgtggaaatcgagggcgagaagatcaaggtgatccagggggtcaggtccaggaagggtgggacccgggaggggacctcgcccgaggcatagctctagcggttgtcgtcgtccagcgtccagcgcgtggcggtttcgcctcttgctgagccgaggaccctcggctcctcctcaccccttttcacctctctcagcggggccccgtccccacttc

SEQ ID NO: 42707 - DNA, 1331 bp, Artificial sequence
  DNA replication origin
ggcaagtaattgtaactcttttctattatggtacaccttgaaggcgaggttaattaagtcttgtttgtggggtttgagggctggaatctaatttttggggctttttctaatgtcaagagcggattgggtaataaaacgcatattgagaataagacagccttctgacctttcagggtctagggctataaagcgtctcagggttgctgccaaactagccatgaactgggctgggtttttatatttgatgaaaaagcctaaatgctaactgatttgggagaggttagataaagaaaaaggagcattaaccttgactatgcctttagctccagccacctctttaagaggaaattgttgggcaggtcggggagggctagttgcagaatgaaactataagccagaccaggtgtgaggaggggaggtgatagaggattatagggtggaggagtggaggctgaggaagaattgagacctggctcggcctggtgaggagcagcctggggaggaggggagaggtcagatgggtcagtagaaaaggaagattgaaaagactcagcgatgcttggggttggtactgagggaacaggcgggagggaaagaagaaagatttgggatgaattgctttggaaacagagactagggaggggctaatgtgtaaaagaatgcctggacgtcaggcaccttagaccatttgcccattttacaacaagaattatctagatcttgtaggatggagaaatcaaaagtgctgttttctggctatttggaaccattgtcgagtttgtattggggtcgagtggcattgcagaagaaaataaggcatttaggttttaggtcaggtgtgagttgaagaagttttaagttcttgagaacacaggctaagggagaagaaggaggaatggagggtggaaagttgcctatagtgaaggagacaagcccagagaaaagagagggtagagacatggagagaaggggtgggggggtacttgccccctaggaaagtggtacttgccactaaggtgaaggatcaaggcaggtgtccccacggtgatcagacacctctgaaacatgggtgaataatcaggcaggcatccccacagtgattaaacaccaagggaagcctgtcttcccgagtctgtggctggcgccggagttttgggttcatggataaaaagcatctcctctgtctctaccagaaaaggaaaggaactgaaattaagagaagggagagactgaagggtggtgccaagattgaaagaagaaagaggtagagggatagtgagagaggttggagaagagagtaaaaagaggccacttacccaatttaaaattgg

SEQ ID NO: 42708 - DNA, 1055 bp, Artificial sequence
  DNA replication origin
agaaaccgaaggggagcatctttcaacagtatcccttacactaatacaatggaggtgtttgcttactccgcttacaatcacggccgccgttgcaaacttcacccttagaaaaattaggattattccgggaaagatacccattcaccctctgggtagcaggatcttgccagttcctcagctgtcagagcgagctcgtggagagaagggaggcgcctgaagaaggcggcctcccaggggggtcgaggaagcagggttcaatcgaagaagtaaaaccaccgatgccagaagagtgaaagacagggaagggactcagctgaggggagagagagaccagaggaccgttaagcccctcccaggccgggaaccaggccagcccggccccgcgcggcctggcgcggcccagccccgctccccagcctggaagtccaggagctccccctcacctgctcgggctcatcggacgactgggaagctgaggctcccacagtcggaaacgccactgcagcgccaacccggaagcattgaaaccaacggaagtaaccaaagcgttgcttcggcaaccgcggcgcagccatttcaactccgccccttccaaaactaaaaacaaaggcgcgaaataagaggcggaagcggcagagttctaaaggcgagggtcggaaccactgcaggcgcagaagcctagaggggcaaccggacttgcgggaggtggaggcagggcagctaaggcgtgagaatttggtagcttccccagttaacgtgctcgccagaggggaaagaggtgtcgcctcgtcaccgcgaaacccacccacctggcgcgtagaaggactagaaaaggaaggggcctcgccccggtatcagggcttgaggagtgggtcaaggggagtggtgggcgtagtgccctgcgcgctcagtacgaaaaaggcggcaacgtggagggggtggggcaaaggcttcaaaacaaaagtaggaaagtgagacataggggtgagccgaatttagtgaggtgcctgggctcaatgagaaaataaagttcaaggccaggcgcggtggctcac

SEQ ID NO: 42709 - DNA, 1100 bp, Artificial sequence
  DNA replication origin
tgctcgaggtgtccggtgaccgaaacactcttagctgggtgcagggtgcggctcagggcgtggtcaccgggggctacttagggccgccggtgcgggggacgacgcaaaggttaactgcgagctgccgggcactcagcgcgggtcatggcgtggatactggactgccttttcgcctcggcctttgagccccgcccccgccgtggtgagtggggcccaccgagtcggggggctggggtgctcggccgggggcggccggcggctgcagccccctctgggcgccctggggcttggctggtcgcccccttgcctcccttcctgctggcttttagctaattgttcctggctcaagggactgccccgtcgaggccccgcataaatcaccagctttgccgggaaccgcgagcaatcgcgctaatggctcggcggtacgcgggacgagcgcgtgggcggagtcgctggctcagccgccggcagggacagccagagccttggggccagacgcgcaggagcggcgtcccgcaactcaaggaccctcaaggcccaaggatgaatgtccctgacagggcaagccaggccccagggaccctgaaggaggcgggtattcattttgccttgaagttcgtccccttgtctcaatctcaaacacagaatatcagcaatggaccccctagagtcgtcgaatttaaccccttcatttaagagatgatgacactgaagatgggaaaagcctgcccaaggttacccaacaggttggcagcatacctgggtcagcttaggctctgccagctgcccactgccccagactgcccagtagtggacccctgcggtctttagtcgggttctttccttgggtacttgagatcaatgcttggtttccctatttctgtggaattgaggacacaagtgtgcaaagatcacagcaccggcatatgtgggtcacatttcaccccttttcgggaactgcttctacaaagtacattttgacaactgattatattttcatccttaaagtttcaggagactgatattttctttttgacataccccaggacccccacccacactgtccttcactcccccttgataataagccccacccc

SEQ ID NO: 42710 - DNA, 1239 bp, Artificial sequence
  DNA replication origin
caaaaagcttgtctgccagtcttaactccttacttcttgaaaccaataaagccctcaacccttaacagtggccagttctctccagtggggctcggggggtgggggcgggtgggggccggggagagaagcacatgtcctggctgagggtgggggtgcggagggggacagaggtcaaggcagtgaaagggccagggggagggtactgggaggaggagcctccggcggggtcgacagtgcgctgagtcagggtccccgcggagacctcgcgccagctcgctgattccctagaccttcttgttttcctgggttccgcctggattttccttggatccaactcacttactccctttgcttgggaatggggaacatgggggcaacaccccaggtcaaaaggaaaagagcatctgtgcccgccccgcctggctcgctcatcccccctccttttttcccctcctctcctcctcgcccccttctcttccgcccaaagggaaggcgggggcgggctgtgtatgtatgtatgtatgcatgtaagcgtgtgtgcgcgcgcgcgggtgcggtagatctgtgtgtgcgttcggtgtgtggccgggtgtggggggtgtgtgcgcggagcacgttttagctggagtgcttggtgtggtgtgtatttggtttgcgctttgacatgcagcatgtgtttgtgtgtgcacgcttataggttgtatgtttctgcccgattatagtgggattatgtgggtgcggtttgaaggtgggtgtgtgctgttcctgccggggtttgtggtcgtgctgtggtgagtgtatatgtgtgtgcaatgtgtggatgtgtgtgtgcccgttgaagcttgtgtgcatatgtgtggagtgtgtttatgcttagatgcagtgtgtcaatgtgggtttacaggtggtgtctgttgaactgtgtagtgtgtgaatgtgtgcgtgtgcaagatttctctataagtcaatctacttgagatgtgtgttcaaaggtttatgcatgtgagggtgcggtgtgtgtcttttggtgtgatgttctcatgtgtgtggtgtggacgcatgtggtcagcttacgtgcttggatgaaggggttgtgtgtgtcttgaagggggattgccgcgtaagtgtatgggtgcggtgtgtgagagtacagggttgtctaaaagaacccaagtgaccgtgtgtgtggttgggggcggggacgagtgggacgttgggctgggactgagagaagaaagg

SEQ ID NO: 42711 - DNA, 913 bp, Artificial sequence
  DNA replication origin
ggagatattatagataaagaagtatgtgctgcactaagctttaagggtctctctcgaggtgaggggcgcctctgcccggccgcccctactgggaagtaaggagctcctctgcccggccagccgccccgtccgggagggagggggggggggttagccccccgcccggccagccagggagggaggtgggggggtcagccccccgcccagccagccaccccgtccgggaggtgaggggcgcctctgcccggccgcccctactgggaagtgaggagcccctctgcccggccagccgccccatccgggagggaggtgggggggtcagctccccgcccggccagccgccccgtccgggagggaggtgggatcagccccccgcccggccagccaccccgtccaggaggtgaggggcgcctctgcccggccgcccctactgggaagtgaggagcccctctgcccggccaccaccccgtctgggaggtgtgcccagcggctcattgagggcgggccatgatgacaatggcggttttgtggaatagaaaggggggaaaggtggggaaaagattgagaaatcggatggttgccgtgtctgtgtagaaagaggtagacatgggagacttttcattttgttctgtactaagaaaaattcttatcctgttgatctgtgaccttacccccaaccctgtgctctctgaaacatgtgctgtgtccactcagggttaaatggattaagggcggtgcaagatgtgctttgttaaacagatgcttgaaggcagcatgctcgttaagagtcatcaccactccctaatctcaagtacccagggacacaaacactgcggaaggccgcagggtcctctgcctaggaaaaccagagacctttgttcacttgtttatctgctgaccttccctccactat

SEQ ID NO: 42712 - DNA, 1279 bp, Artificial sequence
  DNA replication origin
ttggctgcctctattgtattattgtacaccttgaaggtgaggttaattaactcctgttgtggggtttgagggccggaatttaatttttggagttttatttaatgtcaggagtggattgggtaataaaacgtatattgagaataagatggccttttgaccttttagggtctagggctgtaaagcgtctcagggttgctgccgaacgagccatgaactgggctgggtttttcagatttgatgaaagagcctaaacgctaactgatttgggagaggttggataaagaaaaaggagcattaactttgactatgcttttagcttcagccacctttttaagaggaaattgttgggcaggtggggaagaactagtcgcggaactaaactgtaagctggaccgggtgtgaggaggggaggtggtagaaggattatagggtggaagagcggaggcagaggaagaattgggacctagctcggcctggcgaggaggggagaggtcagatgggtctgtagaaaaggaagattagaaagactcagtgacgcttggggttgggactgagggaacaggtgggagggaaagaaggaagatttgggactagttacactgggaacagagactaggaagggaccgatgtgtaaaagaatgcctggacgtcaggcacctcagaccgtttgcctattttacggcaagaattatttagatcttgtaggatggagaaatcgaaagtgccgttttctggccatttagaaccactgtcgagtttgtattggggtcaagcggcattgtggaagaaaataaggcatttaggttttaggtcaggcaagagttgaagaggttttatgttcttaagaacacaggctaagggagaagaaggaggaatggagggtggaaggttgcctatagtgaaggaggcaagtttaaagaaaagggagagtagagacacgtagggaagtggttcgggggttcttaacctccagaaaagcgggaaaggggttgaggcgcagagatatgaggtcggggcatggaaataagggatcagggcacagagatataagaggttggggtgcagaaataagggatcggggtgcagagatataagaggtcggagcatggaaagaagggatcggggcacagagatacaaggttggggtacttgcccctcccccagaaaagtgggacttgctgctaagagtgaaggagaaggggttggaggtttcttgccacccagaaaggcggagaaggggtagagacacggagagaaggggttggggtacttgcccctc

SEQ ID NO: 42713 - DNA, 1201 bp, Artificial sequence
  DNA replication origin
aggcacttggacagccaccggcgagtgggccatggaggcgaatgctgcctcgctccgcttctgcggcggtggcgccttgggttcggactggctcctccctccgggggtagttcggcggccctcccaggcttttcgatcggggcctgggaggacacacaaaagtggggttactgggctggcggcgcgtagcccggggctaggaggtgggctgttagcggcgcagctccctgggactcagtctacctttctggcgcccgcccgccgctgaagcagccgcctccgctgctgctcctcttcctgaacgccgagcgctgtgagtggtggtggctgggacctgggctcgagtgatgccgctcctctgcgcctcgccgctttaggaagaggaggtggaggcgccccagccacccgcctgctcgcctggcctgggaggcggttgggggcggttccgccgttggccctgcccccgccccgcagccgggcggtgtcgcgggagccaaggctccaggcagcgaagaggtttggctggggttgctggagtctgagaagctggagactctcccggcacgcggagaggagaacccggggacccggagacctgggacatggctgggcctgggaagagaatggaagagtttgggaaaccctgagggtatgagggcgccccagatgcggccacgttgcagggaggcgtgcgaggctggggcacacgcagcctcggagacgacttgagctgaaacttggggagtgttggaagtctttcttggctccccggcctggccaagggtaggattacagatagccgcggagtcggtggacccccgctttttcccgccatctggtctcctcagctgggggtcgcgcctctgggcagatctgtggccacactcttgctttccgagttccctgaccccaaacatgcttcaggtgacttcaacttaaggttccccctacctcctgggctatcccttgcagaacggccaaactagggcttctctctaccacaagttctgcacgtgtaaggcagagggaaattggaaaacagatggtacatcggcagaaaaattaatgaggatagtagaggcttgggaaatgagattggatcgttagcagtacaggttattgaaatcagcatacactgcagtggttttggtaactccctgcctccgccccattttaagttctactccaggagagggagaca

SEQ ID NO: 42714 - DNA, 984 bp, Artificial sequence
  DNA replication origin
cccagccaccaccactcacagcgctcggcgttcaggaagaggagcagcagcggaggcggctgcttcagcggcgggcgggcgccagaaaggtagactgagtcccagggagctgcgccgctaacagcccacctcctagccccgggctacgcgccgccagcccagtaaccccacttttgtgtgtcctcccaggccccgatcgaaaagcctgggagggccgccgaactacccccggagggaggagccagtccgaacccaaggcgccaccgccgcagaagcggagcgaggcagcattcgcctccatggcccactcgccggtggctgtccaagtgcctgggatgcaggtgaggaagcgcaggccgcccccgccgcccacgtgactgcttgggagcccggtgcgccctcggtgctgggcaccggcgacaagggacggccccagggctcccctgagggcagggccggtcactatggccaggtgacctgggagtagggctggaggtgtttcctggtgtgtaggctaggtagtgctcttcgctgggaaggcgaggcgggactggagcgcgcaactaggtggagattgagggcggttgggggtataaaaataggccagagccacagacacctgcgcctgctgagcttggcacggttggggatgggggggcggaacttaacctgggagagatggaagtgccttggaatttgtggggtataacgcgagtagtgagtgccctacaccccccaccccaaacacacactcaagttggggcggggcaacaccaggggtggcggcggcggcggcttgaattgggctcttcctgtgtgcgtagggctaagagagaggtgacctctttctccctttcggtactgctgcttaagggcaaagttgtagcttgctccccgacctagcccagcccatagtgtggcgtgagaaatgctggttctgttcagagtcactgaggtgatgacttctcagccccctccgtgcct

SEQ ID NO: 42715 - DNA, 1422 bp, Artificial sequence
  DNA replication origin
aaggcccccgcttctttccccgcggcgagcagcagcgctggggcagcggagagacagaggagccagcgggtggccatggccttggcgtgacagagcctccccggcggccgggcgggtgcggacggcggggtaagcggcagtagcttgatccgggtgggagttgggggaggcggcggccggcgccgcaggttcggggcgggggtcagccgggtaatgtgcgtccttctccccttcacaggccggacgacccccgcgggagccggggcccagaaacccgcccgggcagcggtaactggaacggagccctcaggcctgagccggctgggctgcgcgagcaggaagcggggtccctgggcccctttgtgtgaagggcgggggaggagtgccgggcagccccgggctgcgggctcctccgacgtccgcctcgccgcagggtcccctcgccgcagcccccaccctttccctcccgggggcacgcgcctcctcgccaccctcgccgggcttttcccaggctcgccctcctccccacgccccctgctcgggctgcagttcctataggaagggcattaccatcccttccccaccctccccgactctacgctctttcccctccccctcctgtaacttcctcttcttccccggttgggccctctgctcctctgcactctcctccccagttcgcagatttccgcccaccttccgcctcgtctagccgcgccacagctagcggggtgatctttccccccctctggtaggagttggtgaaggtgagactcatgagggaatacaaggtagtggtgttagggagtggaggggttggcaaatctgcccttactgtgcagtttgtcactgggactttcattgagaaatatgaccccaccattgaagatttctaccgcaaagagatcgaagtggactcttccccctccgtgctggaaattctggacaccgcaggaactgagcagtttgcctccatgagagatctctacatcaaaaacggccaaggtttcatcctggtttatagcctggttaatcaacagtcttttcaggtaaccaaaccaagtcttgtaatttgttagaagggggtgtggtaatccgacatcgacttctgggttgcttgaaccgtgcattaatgactgtgctttgcttttgaaagttagacatgacgcatttttgaggttactcctgccatggaagactatcgggttgtttctatagagcgtagtaaaaagtaacaagcgtcaacaaatattttaaagctatttttaagtgaaagaaaagtgaaaaagaaatgtcagtctgtgtatatttcgcctggaatataaccttctgaagttgcttgctcaattcaacaagtattgattaacttacacgacaaaacatctaacaaataatctcgggtaaatagagcactttgaaaaa

SEQ ID NO: 42716 - DNA, 1156 bp, Artificial sequence
  DNA replication origin
tcagtccactcggagcacacctcggagcgccccagctccctcgcggaggccgggcgtggggctcccgcccgggctcgcagctaccatagcaaccccggtcccaaccccgcccggcctttgccaaaggcgtgccctcctcccgggccagtgccctccgccggacgccagacgtcccctcgcgcagccccgccgaccccaggcagcccgggctggggccgcgcctccgtgcgtcccgcgccggacagacgcggcacgcggagggaaacggcgccagcgaggggctttaggcgccaaaacggaaactcccgcgaaactccgcgggccagcggagcgcgggcgggcatccggagcgccggactcggaagcggcgcacgcggccgcccggccccgccccgcccggccaggtagcgcggcgccgccgccaacctcacctggctccgcgcgccgctgcgggacgggcgggaatgcggccaagggccgccccggctcccgcgcccaccccggactctctggcctccgcctctctctcactgctcccaaagagcgccaaaaagtcgcgctgcggctcacgctcggagtgcgggcactttcttcctgtagggcgctgtttcgtcgcgaaatatattctttgtgtggttcgctcactcgtgcctggttctccgagagcgcagcgcgggctttattctcagggggtgtggcgcctcgcccccaaacccagcagcccagcccccgctgcacagaccctttgtcatttcattaggaagggaaagggggacaaatcataacgctcagattttacaaaagcgaaaacaaacgaagcaggcacacatccccagaggcggggttggggtaggggtgcaaagtttctggctcttcaggaactgaagtgccagtgagaaaggcagtgtggttcacagcgggacgctcatagacacttcccagacaggtgaggcgaaatgggtcctttcaaaattgatcttagtcgatgaataagtccactcgctacaggctaaataaatacattcatactcaccagctgccttcttgggggttttatctttcataaatgccccaatcgtttatttccctctaagaatttcagacagggaaatgctgatcagtgcaatctgttccccttcttccacggagtttgcag

SEQ ID NO: 42717 - DNA, 1082 bp, Artificial sequence
  DNA replication origin
cattcccccagggtaactctgagcccccggctccgagctccctcgaggccgcctaccgggtgggcaagcgggcgcgggcgccggcaaaaggagggcttcggggcatgcggggagaaacccggacagaggtgtgcgctccaaagaggataggggcagaagagcccggagagtccggcggacgaagcgggatggggatgggagcgggagccaccgagagtggagcgagacacgcgggggcccggactgggggcgtgagttgaggagtggggcgactgggcccggaggggtcccactggggctaaaccccgtggaggggctccggggagctccggagagctctggcggggggagggggcgaacggcccgcgggaaggagtcggggtgggggtgtgtgtgtgccgcagaagccacagcgctgagcctgccgggaaggaaggaagcggggaagggagccgccgccgcagccgccgccgccgtggagtactcggtgcggaggggagggggagaggggcgcagcagcggctccaggggaagggggcggtgcgggggcacgacgagcgcgggctgagctgcgggattgacgtaacgagcttgggtttcccccagcgtcgggaacatggatgagaaatccaacaagctgctgctagctttggtgatgctcttcctatttgccgtgatcgtcctccaatacgtgtgccccggcacagaatgccagctcctccgcctgcaggcgttcagctccccggtgccggacccgtaccgctcggaggatgagagctccgccaggttcgtgccccgctacaatttcacccgcggcgacctcctgcgcaaggtagacttcgacatcaagggcgatgacctgatcgtgttcctgcacatccagaagaccgggggcaccactttcggccgccacttggtgcgtaacatccagctggagcagccgtgcgagtgccgcgtgggtcagaagaaatgcacttgccaccggccgggtaagcgggaaacctggctcttctccaggttctccacgggctggagctgcgggttgcacgccgactggaccgagctcaccagctgtgtgccct

SEQ ID NO: 42718 - DNA, 1278 bp, Artificial sequence
  DNA replication origin
tcagagttaaatattcagccagcccacagaaattggaagtcacagttatagacgggtcacagtctgttcatgttgatagtctgttaacaaaatgtagaagagtctgcaagcaggtattcaaaataacagctcctcatagccagccatgtcaacgtggtttacaaacaacagtggagaaagtctcaacaaaccctctgagggtgataactgtaatgatggttcgtatctttgccctatgtaattttatgggaattgagagtctagccaaataataagttccagccctttttatctgcccagttcccagcacactcccgaggtgtctgaggcacttctcaacccaacctcttaaagcagattgtaacaataacaacggtaatgacaagttcccgagctgcacagttcccttcatttaaggagcgctgggagcttcaaaaaaacactcattaatggaatctgacaaagcttgcaagatgggaagtctctcccatttccagttttctggtggaaaagtggggactgagtcccagaggggtgtcagtctctctcaaggggcttgagggggtagggggtttgggagtcctgggctaccattattccatgaaattcgagagtcaagagtcccgggttctggacgcccccttccccggcgtgctatttaccaagtcgcttcccatttctgggccccagttcccttaatagaaggaagggttgggccaaatggtctccaagatctctgcggtcaaccctgtctttgccccctcacctcgcggttgggggtttctcccgcttcagagttcggttagacttgtagtagaaccgggtcgggggtgggagtggcgtcgaggggttggagtgttgcggatgcgggaaggaggatgcctgatggggtcctggacaaactggtgtttcacgagtaccgtcctatgggaagcaggtctggggagaccaggtgaggctctaggacgagctcggagccccaaatccccctgctgcctgcagcgaaacaatgcgagtaatgtgccttccccgcccagcccgggagctgcgcggataggagcgtccgcgggtgcgggatggcagcggggaggcggatatcgcggcgggagggctccgcgcggcttttgcccataggcggcgggtcaggtggccgcgcgcaagaaggcctggggctcagacatgggcttcgggacaagtcccaggccgtcccgttccccagaacctgggcccttcagcccggagtagttggccttccctttgtggttggggggcggtggg

SEQ ID NO: 42719 - DNA, 797 bp, Artificial sequence
  DNA replication origin
ccgtcatcccgtctaggaagtgaggagcgtctctgcccggcctcccatcgtctgggatgtggggagcgcctctgccccgccaccccgtctgagatgtgaagagcgcctctgcccgaccgcgaccctgtctgggaactgaggagtgtctctgccccgccgccaacccgtctgggaggtgaggagcgtctctgacgggccgccccctctgagaagtgaggagcccctccgcccggcagccgccccatctgggaagtgaggagcgtctccgcccggcagccgcccagtccgggaggtggggggcagcccccgtccggctgccgccccgtctgggaggtggggggcacctctgcccggccgccctgtctgggaagtgaggagaccctctgcccggctgccaccccgtctgggaggtgtacccaacagctcattgagaacgggccatgatgatgatggcggttttgtccaatagaaaagggggaaatgtggggaaaagaaagagagatcagattgttactgtgtctgtgtagagagaagtagacataggagactccattttgttctgtactaagaaaaattcttctgccttgtgatcctgttgatcggtgaccctaaccccaaccccgtgctctctgaaacatgtgctgtgtccactcagggttaaatggattaagggcggtgcaagatgtgctttgttaaacagatgcttgaaggcagcatgctcgttaagagtcatcaccaatccctaatctcaactacccagggacacaaaacactgtggaaggcggcagggccctctg

SEQ ID NO: 42720 - DNA, 1381 bp, Artificial sequence
  DNA replication origin
gacaggcagatcacctgaggtcaagagttcgagaccagcctggccaacatggtgaaaccccatctctactcaaaatacaaaattagcctggcatggtggtgcatgcctgtaatcccagctacttgggaggctgaggcaggagaatctcttgaacccgggaggcagaggttgcaatgagccgagatcacaccattgcactccagcctgggcaacaagagtgaaactctgtctaaaaaaaaacaaaacaaacaaacagaaagatacaattgtggatagaaaagagagggtaggtgggagacagaaagacagaggggggaggaaggagagaaagagaaagagaaagggagagagagagaaaaggatagaaagagagaaggagggagggaagacaggaagagagagagggagggaaggagaaaaagaaggacagggagggagggagagagagggagggaaggagaaaaagaaggacagggagggagggagagagagggaggaaggtaaagagagagagagggaggatggtaaagagagagagagggaaggagagacaggagaggggggaaggatggagggagagaaagaagagagggagaaggggagaagaagagagagagagataaagaggggggagggagggagagagagagagaggccattccaggctaagggaatagcatgaagaaagacatgggaactccagagtgcttggcattttcagcaaatggtgaatgggatggtatgactgcagcatatggcacttggagaaatatatgggcagttgaaactggaaagcaagaaaagatgagctggggaggctcatgaatgccatgctcaggaattaggactctatcccacatgcagtagggagccatcaaaggattttgaggaagagagaaatgtgttccaacatatgtttcaggaaaagagttttctctggttccagctatcacagaatggaacattctttcttcctggatggcaatgggcccctggagaggaatggctcttatgtggctaaggcattgaggactgtgggtggcggtggtggggaagctgaaggaaagaggagaaatggacagcatcaaaagagatggcacctgtgtgaatgtgagaatgggcactcgctgacatgcaggtccaaaggtgggaagagaggaggatggagccaggatgacagtgtgtgcttccgagtaaattgagggaaaatgagtctcaattctccaaatcccattgatgatgagtgtattagtccatttttatgctgctgataaagacatgcctgagcctgggcaatttacaaaaagaaaagagacttaatggacttacagttccacatgactggggaggcctcacaataatgatggaaggcaaggaggag

SEQ ID NO: 42721 - DNA, 998 bp, Artificial sequence
  DNA replication origin
agtcagccccgccctgccccgcgccgccaagcggttcccgccctcgcccagcgcccaggtagctgcgaggaaacttttgcagcggctgggtagcagcacgtctcttgctcctcagggccactgccaggcttgccgagtcctgggactgctctcgctccggctgccactctcccgcgctctcctagctccctgcgaagcaggatggccgggaccgtgcgcaccgcgtgcttggtggtggcgatgctgctcagcttggacttcccgggacaggcgcagcccccgccgccgccgccggacgccacctgtcaccaagtccgctccttcttccagagactgcagcccggactcaagtgggtgccagaaactcccgtgccaggtgaggaggggtcccttgagcgtgcctagcgcccagcggggagcaaggcgcgcgtggtggctgtaccctgagcgcgctagccccgccgggctgtagtcgtgcgccctgcagctgggcacttgggagtggtcggtgtgcctggggcctggctgggtctactgagggagggagagagggtgtgtgtggacggagcccacatcccccagtctcacgctgctgtcagggaaggtgtgagcgggaggaaccgtggggatcgccttctcgtgagcgcccgttttttggaagggcgagaaggtgggagctattttcccgggtctctgcgaactggcgccccacagccgagctggtgcctcatgaatttgccatccttgctcgcacatacgtgtcagaatttcagccttagctggaccacagctccagccatcccttccccaacgtacccccaccccccgccgcctttacccagcctgggtttcctaagctcacgggcccaagtgcaagcaaagttgaggacagatttctgagtctgcagtggcgggtgaagacacactgaggcaaacttttgagtaagagggtccccaaaatgaggagactgaaccttttccttcaaaacagcatccct

SEQ ID NO: 42722 - DNA, 1150 bp, Artificial sequence
  DNA replication origin
aagctgagcagcatcgccaccaccaagcacgcggtgcgcacggtcccggccatcctgcttcgcagggagctaggagagcgcgggagagtggcagccggagcgagagcagtcccaggactcggcaagcctggcagtggccctgaggagcaagagacgtgctgctacccagccgctgcaaaagtttcctcgcagctacctgggcgctgggcgagggcgggaaccgcttggcggcgcggggcagggcggggctgactggggtggggcggggcgaggagggacggggcggggcgaggcgagccgcgcggccagggggcggtggcggttgtgcggccggtagccggcggggtgcgggggcgcggcgtggagcgcggcgggggccactggggcaccgcggcgcggggaccgggcgaaggcagtgcgagaggagggtgcggagcccgcgcggtggctcccggcagccgagcccagctgcccgctcgcagccgctctacacagggcgctctggcataactactgcagaggggctgcaggctcgagcgcgctgattggcttcccagcagccgtccgctctgactggctctgggagaagttccccagcctcactcctccttcccgccgctcattggcctacagcctggagggcttttccctttaggatttttgtctccttttcatccttcctgggggcaggtgggggtccctgacttaggtccccctccgcttcgccacaggccttctttcagcttgtgccagctctttcctggccaccagagccacacaaggtgttccttcacacaaaatccacctcctcattctactctctgaggagcttcccgggaaccgttttcctaacgcagctctgaccgggttctcaaagccaacctgcaaatagtcgcgttcagggacagccagggaccgctgggcttttcacagcctgcctcacctttgaatattgtatcttaaaagtctgaaagcctctgtggcttgctagatttgattcagtagagccacacaaagtcagagaaagcacctgattctggggcgttaaaagaaaatctactgcacgacagtcccaggtggcccttcaagaggcaaagcctaactggttacaacgaaataaccaggggcttaaagccagcctaactcatta

SEQ ID NO: 42723 - DNA, 1214 bp, Artificial sequence
  DNA replication origin
ccgtgggtaactggggctcggtggggttttcgctttggcggggtgggggttccgtttcctaattcctgtgcgggccgggtgggcgggggcgggcttttttccttgggctattaaaggcagaggggcgggcttttcccagggatatagctacggacagagggccaaggggacggagcgctcctcaagtggtggcagggaggctcgtggccccgcgtcgctctggacaggggcgctttggggtgagatgtgcgctcgcggccttgatccatttagtggacgctttttctcacttctcttccccttctggctccgcgggagactgcgctcgcacccggccccggagcgctcgagctgcgcgctgggacactgggtatacgtgtggaggggacacccggagagggcggcccgtgcgggatccccgcgctctccacctgcgaggggcgggccggagctgggtcccgcgcgcggtttcccgagcgggtggctgggcaagaagggagcccttcgttggggcagctgtgatccggtagagttgactggttgggtgggaggggacggagcgggcgggacttgagaaaagcaaagtaccagagtgcggttgaggggtagcgggcagcgcgcgggaaacgactccccttttcttctccaccgttgacctttaggttcctggaaaactttggtggtgagggtgtgaaatgagggggtgcacgtggagggaaaaaagggactcccctccctcttggcttctatcccaccaacccgggaatggagggggagggaggcgtgggcttggcgcgtttttggtgctttgaatggagaactccgtttcccatgatgctttgtttctttctctttaatttcggcggcggctgaggctgcacgaggactggagcgcgtggtgtgagcagctggagcacaccctggacgcgcgggctgctcgcggacttcaacgggagcattaggtaagggtgtgagagacgcgggaagaggcaaaagggagccacaaaggcgtacagggaaggacttctttctttcttttccttattattattattattatttgcaatttaaggggattggagagtgactgcccagcgtgcgcgagggatgccagatgaaccgctaattagcaaaaggtagtaactagaagggcgccctgtctgatggctgtggggctcagtttggccaggttgggttggcaaatactatgcatt

SEQ ID NO: 42724 - DNA, 972 bp, Artificial sequence
  DNA replication origin
aagaatttttcttagtacagaacaaaatggagtctcccatgtctacttctttctacacagacacagtaacaatctgatctgtctttcttttccccacatttcccccttttctattcgacaaaactgccatcgtcatcatggcccgttctcaatgagctgttgggtacacctcccagacagggtgggggccgggcagaggggctcctcacttcccagacggggtggccgggcagaggcgccccccacctcccagacggggcggtggccgggcggaggcgccccccacctccctcctggatggggcggctgccgggcggagacgctcctcacttcccagatggggcagctgccgggcggaggggctcctcacttcccagacggggcggctgccgggcggaggggctcctcacttcccagatggggcggccgggcagagacactcctcacctcccagacggggtggcagtggggcagagacactcctcagttccctgacggggtcgcggccgggcagaggctctcctcacttcccagactgggcggctgggcagaggggctcctcacatcccagacgatgggcggccaggcagagacgctcctcacttcccagacggggtggcggctaggcagaggctgcaatctcggcactttgggaggccaaggcaggcagctgggaggtggaggttgtagccagccgagatcatgccactgcactccagcctgggcaacattgagcactgagtgagcgagactccgtctgcaatcccggcacctcgggaggctgaggcaggcagatcactcacggtcaggagctggagaccagcccggccaacacggcgaaaccctgtctccaccaaaaaatacaaaaaccagtcaggcgtggcggcgcgcgcctgcaatcccaggcactcggcaggctgaggcaggagaatcaggcagggaggttgcagtgagccgagatggcggcagtac

SEQ ID NO: 42725 - DNA, 998 bp, Artificial sequence
  DNA replication origin
ccagcctgggcgacagagcaagaccatgtcttgaaagaaaaaggggagagagagagagagagagagagagagagagagagagagagagagagaagagggggagggagggaggaagaggaaaaagggagggagagagggaagaaaggaaagagggagggagggaggaaagaaggaaggaaggaaggcaagaagggagggagggagggaaggtcatggtttggtccaggcatggtgattcacacctggtaatcccaacacactgggaggccaaggtgggaggatccattgaggccaggagtacaagaccagcctgggcaacatagcaagaccctgtctctaaaaaaaaaaattagccaggctaagcaggatcacttgagcccaggatgtcaaggctgcagtgaagtgagctatcattatgcccactggactccagcctaggtaacagagcaagaccctgtctcaaaacatttttgccttttttaaccttttttttttccttcagggaggtatggccttagactattcagaacgttactggtgggaataacaaagggagctgaccgaggatttatacaggaccgtggaggggtgtttagagccaagttgagatctgagcccatgaatctgtaccagtctccatggttgtggggttttctccagcagtactcagcagcctagtatatggacagagaaaatggggtgtgttttgagccagggtgtggcttagccatcttggcagagctgaatcatagggtacaaagggcttccaggagtcagggagagtgattcaggtgggatccaaacagaactggtaagtaaaggaagtcaggaacagggtgggagaccgtagaattggagatctccatgaatctgaagcacaattagggtggctagagagaaccggagaggaagcaaatcgcagtcagagattaggatactacagtttaagggctgccatgagcagcactggaaagcgtccccataccttataccactgt

SEQ ID NO: 42726 - DNA, 1679 bp, Artificial sequence
  DNA replication origin
cctctgaataggagactgagttgggagggaaaggggcttcgctgggggagcctcggcttcttctgggagaaaattcccacggctacctagtgagcctgcaaactggtaggcgccggcgtaggcgcgcgggcggggccgggggcggggcctgcggggcgtggcggggcgggcagagggcggggcctgcttctcctcagcttcaggcggctgcgacgagccctcaggcgaacctctcggctttcccgcgcggcgccgcctcttgctgcgcctccgcctcctcctctgctccgccaccggcttcctcctcctgagcagtcagcccgcgcgccggccggctccgttatggcgacccgcagccctggcgtcgtggtgagcagctcggcctgccggccctggccggttcaggcccacgcggcaggtggcggccgggccctgaggcgcgggatccgcagtgcgggctcgggcggccgggcccagggaaccccgcaggcgggggcggccagtttcccgggttcggctttacgtcacgcgagggcggcagggaggacggaatggcggggtttggggtgggtccctcctcgggggagccctgggaaaagaggactgcgtgtgggaagagaaggtggaaatggcgttttggttgacatgtgccgcctgcgagcgtgctgcggggaggggccgagggcagattcgggaatgatggcgcggggtgggggcgtgggggctttctcgggagaggcccttccctggaagtttggggtgcgatggtgaggttctcggggcacctctggaggggcctcggcacggaaagcgaccacctgggagggcgtgtggggaccaggttttgcctttagttttgcacacactgtagttcatctttatggagatgctcatggcctcattgaagccccactacagctctggtagcggtaaccatgcgtatttgacacacgaaggaactagggaaaaggcattaggtcatttcaagccgaaattcacatgtgctagaatccagattccatgctgaccgatgccccaggatatagaaaatgagaatctggtccttaccttcaagaacattcttaaccgtaatcagcctctggtatcttagctccaccctcactggttttttcttgtttgttgaaccggccaagctgctggcctccctcctcaaccgttctgatcatgcttgctaaaatagtcaaaaccccggccagttaaatatgctttagcctgctttattatgattatttttgttgttttggcaatgacctggttacctgttgtttctcccactaaaactttttaagggcaggaatcaccgccgtaactctagcacttagcacagtacttggcttgtaagaggtcctcgatgatggtttgttgaatgaatacattaaataattaaccacttgaaccctaagaaagaagcgattctatttcatattaggcattgtaatgacttaaggtaaagagcagtgctattaacggagtctaactgggaatccagcttgtttgggctatttactagttgtgtggctgtgggcaacttacttcacctctctgggcttaagtcattttatgtatatctgaggtgctggctacctcttggagttattgagaggattataagacagtctatgtgaatcagcaacccttgcatggcccctggcggggaa

SEQ ID NO: 42727 - DNA, 1732 bp, Artificial sequence
  DNA replication origin
tccgtgtctcacctgggtcctgcaggcgtccactggaggaagccggatggcgcgggcttggtctttcaggaaggctggctggcaccgggcttccttctggctccagggggaaccgtacaggacggggagaaagggggaagctggtgagaggcagaaggggcgtcacaaggtggctctcccacccccaagtgcaaaggcaggcggatgcggggacctgttcgccgtttgagcctggagattgcgggcctgaggggccctgcgctggccggccggggcgaggcgggagcagaatggggatttctaggccgccgggtcgggctggtgggcggcgccccgggagcctgagggtccccgccggcccgggagggacccgagccgcccccgcgcactgccccggcgcaagggagtctgggagagccagcgtctcgggccgctgaacccgactcccagctctagacttcggaaccccggccccaccccaaactgggaaacttctaggggcccactcctggccccgggaagcccagttccaggcagcccattcagaccagaggagtttgggtgtcttttttttttctttaaggtgacaaaaagtgtgggaaagattccacacctccctccccacgcccgccaatggtcctttacctgtccatgtttcagattaaataattagctcaagagatttgcacagaaagcgaattagcccttttctagtcagactgttaagctctcaggcgggcaactcggaaccccgtttcctcaccgaaggctcaggaggccagcccagtgagggatggaggtggctttagagggcgacagttgtgcagcactcatgagcaacagtgcccaggacttttgaagtcacgaagggctcctgaaatcgacagctcaggtcccgcccctggggcgacaaaggagtcttgggggcgtgccgccgggttggaattgtggtagcagatttttgggggaggagggcgcaaagcagctagaaacgcacatcctcattctggaactatcccaaggcccccatgcttctcagcaggcctcgggctcagattgggcgggttggagccttccaccccaccttgggttcacccgcccgcaaggcctcgcgcctcacccgatccttctagagtgctggagctccacggagcctccctaaccccccagcagcggggaagggagggcgagggagtggggaagaggcccgttattttgatctttcctgaattcttaagtcccttccatacccaggacatgagcgcgtttaccaggaaccgcagagaggtgtaaagacttcttgcagctgctcacccttcctctccccttactccttttccagtcctccccaccccccagcatttcgtgggtggggactgaagataggttttcttcgttgtcctgtgggtggtattctgattgggaagggatttttttcaattgtttacattctacctgagcagggaaagggggtgccaaaatgaagcatcattcacgtccagtcacatatgcagagacggggcaaacgtttgatgcaatcttgggtctcgctgctcccggggccgacaccgcaggcgatggcctaagacttacctgctgggtaggcccgaacggcagtcccagacttaccctggcagcggaaacaataccccagagcaccgatcgctcactgcagaactgttcccgctgctagggcacggctgagcgcgggcaccgcgtctctcctcgactc

SEQ ID NO: 42728 - DNA, 1291 bp, Artificial sequence
  DNA replication origin
cgaacgtgcaagccagcgagggagacagggaggaaggaagggctggggaggcggagagacagaccgagcgagcgacacacggacagcgacggacagcgacagaagcggggcccgggacttgggagacggcgaggttgcggggcgcgaggtgctgggcacggagctacagggacggagagccgagagccggggtcgcagcgtggagggggcgctggctgctgccgaagctcggagagcggcgtggcggaggcggagcggagccgagcgaggggccagcacggaacgctcccttggaggcgagcggcgcagccggcggagaggctcccggagccgccctagaaaaagccggctcggggggcgtggccacgcgctgtggcgctccccgccccccggtggccccgctcggctccggggcccgggggcggaaggggggaggggaggagaggagctgtagggaagggggttgtgcaggcgctcgacgccgcagccttggcccgctgcgggggagggccgagaagggcactgggcgcccagagtaaccaacaccgagacgaatagcgagggctcggggagaaaaaacggaggatggcaaacggcaaagccaagggcacgaggtagcgcagcgcgcacccagaggctcctgggacggacaccaccccacgctcacgggtcctctggcggtgtcctttgagctgccgggacggcgcaaggtggctgagcgaagctttttgctcggtgcttacagggagtacctgagatggtttgggaaaggaaacagggggtctcagaccgcttgggtgcagcgctctccccatgcgtttgagtgcagatctgtcgagacgccccagccctcgccaccccaccaagctctcaggtagagaggccccgggacagggtgagccccatagtcctttggtgggcataacacagagggaggagcaattgtttacacatgtgcccagtacaagaagggaaactgatatttaagactgaagtggggaaacgggagggaaaggagcccttatcctggatgttagacgctattaaggaccatgctattttgtatttgtgagaatgatattgaaggtaaggaggtccttatccttgaagatgcatgctgaagtgtacagaagtgaaatgtcacgatgtctgcagttttcaaatgatgcagctaacatacgcacacattatgagagagagaacagaaaggaagcaagtattgcaatatgttaacagttgttgcatcctgttgggggtggggggtaaacagacgttcgttgtaccgttcttt

SEQ ID NO: 42729 - DNA, 920 bp, Artificial sequence
  DNA replication origin
ttacagagggacaacatggccccaggtagagggggaccgtttcctccacactgcccaaagttggagattaaactttcactccaccttgggacccaagtcactgtcaagcaaacaagtcgccaccccctcaggttgaagagcccaaatgagctcaaacgtgcactttaaggaaggaagattgcttgcatgggggcaaggagcccctgaatcctgtactccatcctccccaaccctgctcacctgagcccatggattaggggagcgctgctggatctcctcagggttcccccataagatgtgtcaggctcaaggtccagctccattttctcctgagccatgtcagacttgcaggcaggcacagcgggcagtgctcagctcctggtgcttagctatggactcccaagactctcactgcaggactgagctgctggggactggcagctgggggcgggggctaaggggcggaggcttggggacgggggcgggggctgggggcggagaaaagtaggagaggaggagggaaggaggatgatgatgaggaagggaggatgatggtgaggcaggagaggaggacgaagaggtagtggtggaaggtgacagaatgaaggaaaaggatgaaggaaagaaggatggagggaaaacaaggatggagggaggagggaagagggagggaaaaggataggtggaaaagcaggaggacagagaggataagaggagggcagaggggggaaagggagaggaagggggcggaggagggaggggaagggagagggcagaggggagggaggaggacagagggtaagggaaaagaagcgcaggggcgggaaagaaggaggtggtctgggaagaggagagaggagggagaagaggagggggaggaaactaggcagcggcggaactcatgctgctatctttccggc

SEQ ID NO: 42730 - DNA, 889 bp, Artificial sequence
  DNA replication origin
gagaccagcccggccaacacagcgaaaccccgtctccaccaaaaaaatacgaaaaccagtcaggtgtggctgcgcgcgcctgcaatcgcaggcactcggcaggctgaggcaggagaatcaggcagggaggttgcagtgagccgagatggcagcagtacagtccagcttccgctcggcatcagagggagactgtggaaagagagggagagggagaccgtggggagagggagggggaggggggagggggggaggggggagggggagggggagagggagagggaggaaaatgatgttttttaaaaaaaaaaaatttggccaggcacagtggcttgtgcctgtaatcccagcactttgggaggccgaggtggttggatcacgaggtcaggagatcgagaccatcctggctaacacggtgaaaccccgtctctactaaaattagctgggcgtggtggcaggtgcctgtagtcccagctacacgggaggctgaggcaggagaatggcgtgaacccagaaggcagaggttgcagtgagccgagattgcgccactgcactccagcctgggcgacagagcgagactctgttccaaaaaaaaaaaacatttatcttggtcttcattgtggaagttggataaactgggagaaacagaaaatctactgggatattatttcagtaatctagacccatgggacagaagaaggaagcagcagtgacaacaaagaggatattgtcaaggaagaattagtaggattagaagcctaattggatacagtagaaaaataaggaagaactgaagaaaaatcaagagctttgagtcttaaacctgtgactattttgataccatacaatgaggtatcaaatcgagagctttgagtcttaaaactgtgactat

SEQ ID NO: 42731 - DNA, 1288 bp, Artificial sequence
  DNA replication origin
ctacaggatcccaaggcagaagaattcttagtacagaacaaaatgaaaagtctcccatgtctacttctttctacacagacacggcaaccatccgatttctcaatcttttccccacctttcccccctttctattccacaaaaccgccattgtcatcatggcccgttctcaatgagctgttgggtacacctcccagacggggcggctggccgggcagaggggctcctcacttcccagtaggggcggccgggcagaggcgcccctcacctcccggacgaggcggctggccgggcggggggctgacccccccacctccctcccggacggggcggctggccgggcgggggactgacccccccacctccctcctggatggggcggatggccgggcagaggggctcctcacttcccagtaggggcggctgggcagaggcacccctcacctcccggatggggcggctggcctggcgggggctgacccccacctccctcccggacggggtggctgccgggcagagacgctcctcacttcccagacggtgtggctgccgggcggaggggctcctcacttctcagacggggcggctgctgggcggaggggctcctcacttctcagacggggcggttgccaggcggagggtctcctcacttctcagacggggcggccgggcagagatgctcctcacctcccagacggggtcgcggccgggcagaggcgctcctcacatcccagacggggcagcggggcagagacgctcctcacttcctagatgggatggcggccgggaagaggcgctcctcacttcctagatgggatggcggccgggcagagacgctcctcactttccagactgggcagccaggcagaggggctcctcacctcccagacgatgggcggccaggcagagatgctcctcacttcccagacggggtggcggccgggcagaggctgcaatctcggcactttgggaggccaaggcaggcggctgggaggtggaggttgtagcgagccgagatcacgccactgcactccagcctgggcaccattgagcactgagtgaaccagactccgtctgcaatcccggcacctcgggaggccgaggctggcagatcacttgcggttaggagctggagaccagcccggccaacacagcgaaaccccgtctccaccaaaaaaatacgaaaaccagtcaggtgtggctgcgcgcgcctgcaatcgcaggcactcggcaggctgaggcaggagaatcaggcagggaggttgcagtgagccgagatggcagcagtaca

SEQ ID NO: 42732 - DNA, 1009 bp, Artificial sequence
  DNA replication origin
ccggccgccccgtctgagaagtgaggagaccctccgcctggcaaccgccccgtctgagaagtgaggagcccctccgcccagcagccgccccgtctgagaagtgaggagcccctccgcccggcagccacaccgtctgggaagtgaggagcgtctctgcccggcagccaccccgtccgggagggaggtgggggtcagcccccgccaggccagccgccccatccgggaggtgaggggtgcctctgcccagccgcccctactgggaagtgaggagcccctctgcccggccatccgccccatccaggagggaggtgggggggtcagtcccccgcccggccagccgccccgtccgggagggaggtgggggggtcagccccccgcccggccagccgcctcgtccgggaggtgaggggcgcctctgcccggccgcccctactgggaagtgaggagcccctctgcccggccagccgccccgtctgggaggtgtacccaacagctcattgagaacgggccatgatgacaatggcggttttgtggaatagaaaggggggaaaggtggggaaaagattgagaaatcggatggttgccgtgtctgtgtagaaagaagtagacatgggagacttttcattttgttctgtactaagaattcttctgccttgggatcctgtagatctgtgaccttacccccaaccctgtgctctctgaaacatgtgctgtgtccactcagggttaaatggattaagggcggtgcaagatgtgctttgttaaacagatgcttgaaggcagcgtgctcgttaagagtcatcaccactccctattctcaagtacccagggacacaaacactgcggaaggccgcagggtcctctgcctaggaaaaccagagacctttgttcacttgtttatctgctgaccttccctccactattgtcctgagaccctgccaaatccccctctgcgagaaacacgcaagaatgatcaataaaaaaaaaaacaaaaaacaaaaacaaaaca

SEQ ID NO: 42733 - DNA, 861 bp, Artificial sequence
  DNA replication origin
ccagcctgggcaccattgagcactgagtgaaccagactccgtctgcaatcccggcacctcgggaggccgaggctggcggatcactcgcgtttaggagctggagaccagcccagccaacacagcgaaacccgtctccaccaaaaaaatacgaaaaccagtcaggcgtggtggcgtgcgcctgcaatcgcaggcactcggcaggctgaggcaggagaatcaggcagggaggttgcagtgagccgagatggcagcagtacagtccagctttggctcggcatcagagggagactgtggaaagagagggagagggagaccgaggagagggagagggagagggagagggagagggagagggagagggagagtttccaaacatttttaaaatgaaaaggtactctgctgttcccctcactctgtgcactttgctgttggtgtgggaaggcacttaatgatgtttttggctttttttttttttgtaaggtggtgttaactatatggttattggttagaaatcctgagttgtcaactgtatatatctatagtttgtaaaaagaacaaaacaccggagaaaaactcttgatgctccttgcttggtgttgaggctgtggggaagatgccttttggaggggccgtagcgcagggcatacagtgtaaggctggacctgttgactctgcaggggtcatccatttagcttcaggttgtcttgtttctgtatatattgacatagcattctgctgccatcttagctgtgaacaaagtggggtcagctggcatgagaagtttttgggtttgtgtgtgtgtgtgtggtagtttttaaactgtttgttttaaaacaaactatagaactcttcgttgttagc

SEQ ID NO: 42734 - DNA, 1186 bp, Artificial sequence
  DNA replication origin
aacgagcatgctgccttcaagcatctgtttaacaaagcacatcttgcaccgcccttaatccatttaaccctgagtggacacagcacatgtttcagagagcacagggttgggagtaaggtcacagatcaacaggatcccaaggcagaagaatttttcttagtacagaacaaaatgaaaagtctcccatgtctacttctctctacacagacacggcaaccatccgatttctcaatcttttccccacctttcccccctttctattccacaaaaccgccattgtcatcatggcccgttctcaatgagctgttgggtacacctcccagacggggtcgtggccgggcagaggggctcctcacttcccagtaggggtggccgggcagaggggccccttgcctcccggacggggcggctggccgggcggggggctgacccccccacctccctcccggacggtgtggctgccgggcggagatgctcctcacttcccagacggggtggctgccggacggaggggctcctcacttctcagacggggcggctgccaggcagagggtctcctcacttctcagacggggcggccgggcagagacgctcctcacctcccagatggggtcgtggccgggcagaggcgctcctcacatcccagacggggcggcggggcagaggcgctccccacgtcccagacgatgggcggccgggcagagacgctcctcacttcctagatgggatggcagtggggaagaggtgctcctcacttcctagatgggatggcggccaggcagagacgctcctcacttcccagacggggtggcggccgggcagaggctgcaatctcagctttttgggaggccaaggcaggcggctgggaggtggttgtagctagccgagatcacgccactgcactccagcctgggcaccattgagcactgagtgaaccagactccgtctgcaatcccggcacctcgggaggccgaggctggcggatcactcgcgtttaggagctggagaccagcccagccaacacagcgaaacccgtctccaccaaaaaaatacgaaaaccagtcaggcgtggtggcgtgcgcctgcaatcgcaggcactcggcaggctgaggcaggagaatcaggcagggaggttgcagtgagccgagatggcagcagtacagtccagctttggctcggcatcaga

SEQ ID NO: 42735 - DNA, 983 bp, Artificial sequence
  DNA replication origin
cccaaaaagctgagattgcagcctctgcccggccgccaccccgtctgggaagtgaggagcgtctctgcctggccgccatcccatctaggaagtgaggagcacctcttccccactgccatcccatctaggaagtgaggagcgtctctgcccggccgcccatcgtctgggacgtggggagcgcctctgccccgccgccccgtctgggatgtgaggagcgcctctgcccggccacgaccccatctgggaggtgaggagcgtctctgcccggccgccccgtctgagaagtgaggagaccctctgcctggcagccgccccgtctgagaagtgaggagcccctccgtccggcagccaccccgtctgggaagtgaggagcatctccgcccggcagccacaccgtccgggagggaggtgggggggtcagccccccgcccggccagccgccccgtccgggaggcaaggggcccctctgcccggccacccctactgggaagtgaggagcccctctgcccggccacgaccccgtctgggaggtgtacccaacagctcattgagaacgggccatgatgacaatggcggttttgtggaatagaaaggggggaaaggtggggaaaagattgagaaatcggatggttgccgtgtctgtgtagagagaagtagacatgggagacttttcattttgttctgtactaagaaaaattcttctgccttgggatcctgttgatctgtgaccttactcccaaccctgtgctctctgaaacatgtgctgtgtccactcagggttaaatggattaagggcggtgcaagatgtgctttgttaaacagatgcttgaaggcagcatgctcgttaagagtcatcaccactccctgatcttaagtacccagggacacaaacactgcggaaggccgcagggtcctttgcctaggaaaaccagagacctttgttcacttgtttatctgctgacattccctccactattgtccta

SEQ ID NO: 42736 - DNA, 948 bp, Artificial sequence
  DNA replication origin
ttccctttcccgagacgtttgatggcgataccgaccggctcccggagttcatcgtgcagacgagctcctacatgttcgtggacgagaacacgttctccaacgacgccctgaaggtgacgttcctcatcacccgcctcacggggcccgccctgcagtgggtgatcccctacatcaagaaggagagccccctcctcagtgattaccggggcttcctggctgagatgaagcgggtctttggatgggaggaggacgaggacttctaggccgggagaccctcgggcctggggaccggtgctctgggaagggtccgctgtgttactggccgccgccagggtcgccaccggcgccctccctccgcgcctccctccccctcgagccgccacgatgtcccctgcgctcctgtcccctcccgcgtagtgcttgcctttgttccaggaatagcgctccaggctcctgctgccgcccctgggcctcactctggagcgggctgcctccgccctctcgtgccagctcagcccctcccatgcacatttggacgctgtcctgcgctccagttgcacaaagctgagctcctgttacacactgacagaccactgacagccgccgctgccaacccccctcctcctcaccagacttccagacgactacatcatgctgcccacagacctgcgctgccactgccatcgccatccatcgcattccaccgacagactgctgcttctagtgatctgtactcacctcggaggtatctgggctggacacagcccctggacaatgatccagacagctggctgcccctcaagggacctgttaccttcagcgagacccatttcctccccaatcccagagactttttgtgctcctgccacatggctgccagggctcagttgtgcctggcagccaaatcgagtctctcattttctcttgtggaccagttagttttgccca

SEQ ID NO: 42737 - DNA, 1020 bp, Artificial sequence
  DNA replication origin
gtggccactggcacagcgaactcttcccagagcacccgcccccaggcccaagggtctcccggcctagaagtcctcgtcctcctcccatccaaagacccgcttcatctcggccaggaagccccggtaatcattgagcagggggctctccttcctgatgtaggggatcacccactgcagggctggccccgtgaggcgggtgatgaggaacgtcaccttcagggcgtcgttggagaacgtgttctcgtccacgaacatgtaggagctcgtctgcacgatgaactccgggagtcggtcggtatctccgtcaaacgtctcgggaaagggaatcgggttcctccagcgacgcgccgcgggccggaggggcccggccaggagggccttcatcagctgcacccgaccgtccatcgtgccgcgcgcgctccgcggagtttcgctgggttgcgtgggggtcagcgctaaggcgtcgccggaagcgcatgtcgagggtgggggcccgggccgggacgggctgtgggcggagccatgggggagagcccaggcgcttgcgcgagctccgcccacaaagacttgtggtcactagtgcgctggtgcgtcacagggcgcggaagggcaatgccaggagttctggggtgggtctcatactgtggaggaggccgtgtagcctcagaggagtagggcggagattatgcgaggcgcgccagtggggctctcaggacagcaggcggtgtgcggggaggctgagcctgttgcccctggagagcagaagatccatgttctggagatcgatgcggcctcctgccgcactcctgacccctcactctttagtccttggacattgctttcagaaccctgggctctggacgccacttgagtagagttctgtgaacacatttttttttgcttcttcgtatatgtctcagtcagattatttgctccctgctttgcaacattaatgggaaaatcccaaatattagcaaatataatccagagcagcatattcaaagtgtaatgtgccataag

SEQ ID NO: 42738 - DNA, 2840 bp, Artificial sequence
  DNA replication origin
ccgtcctgaggctcgagctcttgcgggtcgatcggtcggcggggcctgcgcggggcccgggcccatggcggcgtcggcggctctgtctgcggcggcggcggcggcagccctgtctggcttggcggttcggctgtcgcgctcggcggcggcccgaggctcatacggcgccttctgcaaggggctcacgcgcacgctgctcaccttcttcgacctggcctggcggctgcgcatgaacttcccctacttctacatcgtggcctcggtgatgctcaacgtccgcctgcaagtgcggatcgagtgagcgccggcggcggcggcggccgcggaggcccggctggaggggcgacagtgtccccgcccgcccccggccgggtcgcgggcatgaaggacagctggatcgcggcggggggcggaggtggggcggcccgggcccctggactctagacctacgccgcccgggcacgaaggcccagccctggccctggccgcggtctcagcccgggaccccggatcgcgcagaaatgcactgaacaggcccctacaattgggctccagaaactacctgagctcggactacctgttgcctcacattggcaaaagagggggaaaccagaaggagggaattctgctgcggcgacttgactttccccgccccgagcagaaaggtaggaggcgacaggttggaatgggggaggggctgtggctctgccctgcagaggtcggggcgccttggcagttggggggaaatatggaaggcaccggagcaaaccagcccgaagagctgtggagcccaggtggggaaaggaaaggcagccgcaggctctcccctcctccccagtcatgattgcaggatagggtgaggggcagccgcctcccgctcattccccagtgccggcctccctttccgcagaggcccccagggtgtccactgaaacctggggaatggaaggtagtgggctgggggcggccccgggaaggccctagaggagcaacgatgcccccacccttctcttccccaccagtcggtgggcatagggaggacggttctcttctaggccgagccctacgtctgttctcttctcagccctcagccctgggtctctctgcagctcctgcacagcccttggcaaaactgcctcctgccctgtctttggggccagaggactggtctctccctgctcctgctgtccgtcgtgttcccctgcccctacctgagggcaccctgcaagctttgcatttggagactgggaagagtgggagagacgcattcctaccgtcccctccccccacagtcttgctcttccgccatgtcagcccatgctccctaaggaccgtagctagcaaggccctcccagggccagagtcccatcctccagccccagacggcctcgagaagcccactgtgtactgaagtgatctgggaaaaagagacctccctgagcacacagcagctctcagcctggggtgggcagagcagatggaggaggggcttgcagaggaggccattcctgggggaagcaaggacgtatctggtggccaggcaactgaggtccccatctctttctttctctttcaggcattgacgtttgtaggcggtgacccgccccttctctggccttgccaagagtctcatccctaccctggggcacctctgaccctggacctgcttgggcagaggcagcgtgaagggcctgaacaagaggagaagaagggccttcctagtagaggcacagcatggacaaaggctcacaggggtgggggtgcccagtgatcgagtcctggcttgggagggaaggtctgagttccctgggaactgaaatcggctagcagcactgtgagagaggtgtatttccccctcctaatgacagaggaaaccgaggcttcggggagggggggatttgcccttgacatgcagataggatgaggaggaactgcgtgtgcccctgggcctgcaggctcccacacccctccccagtcttctccaagacctggcatgatgggaggagggaggggaaagtgaagagggaagcatagggctcctagggcaccaagggagaggggcccaagggtagggaatctggggatctcgctttctttggagcagtacagaagatcacaggaaagattaggacagacagctgagatggcagacaggagagatgggccccaggatccctggggagccaagctttcccccacagcctagcctccccaccccacctggagcttcaccaagggcttttcagcagtgaagtggcacaaacctcccagtttggtgggcaagtggggctgatggtggtgtcatggctcctggagacacgacataaccaggagggtgaagggataaacctggggtgggctggggctgagacccatggcatgaccccaattctctctcctcaagctcgacccccccgccatccccaggatcacacaggagaatctcatcctcacggcttggattggtcctgggggcccccggttgtgctgctaactggtgtacaatgctcaagagcagcccagaggggagccaggaagggaccctcgccctcacctgctatccccatttccgcatctcttgcactggtaccctgagggccacattctcagttcctgggattgaaaactgcagcagtctggccagctccagggacagagtgatccaaccacctaccacgtaccctcctcagcaggccactggacccaggtcctgaatgaagctgtccgcctgcctcaccccagaagaggctggacagtggctgcctcgtgccccctgcagtctcccacagccagggcccgatggggtgcctccttgtcccaagtctcctgagaacccctga

SEQ ID NO: 42739 - DNA, 1108 bp, Artificial sequence
  DNA replication origin
tcgcccctccagccgggcctccgcggccgccgccgccgccggcgctcactcgatccgcacttgcaggcggacgttgagcatcaccgaggccacgatgtagaagtaggggaagttcatgcgcagccgccaggccaggtcgaagaaggtgagcagcgtgcgcgtgagccccttgcagaaggcgccgtatgagcctcgggccgccgccgagcgcgacagccgaaccgccaagccagacagggctgccgccgccgccgccgcagacagagccgccgacgccgccatgggcccgggccccgcgcaggccccgccgaccgatcgacccgcaagagctcgagcctcaggacggcgggaccccaacactagcgcgccccgccggccgccgggagagcgacgtccgccccgccctcgccccaccctcgccccgccctctccccaccctcgccccgccctcgggttctccagactgagccttgcttcaggggccactgcctcggtccctcctccacgagcccgcacagctccatccgctccacatcacgtcactgcgggccccgccccccagcatagctccgcccctaacagcctcgcccccggcagagaggccgtcggcgtagcggccccgcccactagacccgccctgcattctcagctccgcccaccgcccggttccgcccacaaagccctgcctcttttcgggcgcctcccaaggcaggagcggattgaagggcggagctgccagggatcgattgctgtgacactgtctcctagggtggagcaggagtggaggaggacagtctggaccgctaagctgattctgtacagaaagcacatgcagaagactctgcctgttcatatcactccccttctcccacggtctcccctgaaaacttgccagccaagacctttctttaattcgcatttctctttaatgcgcatagtgcagtaattctgcgctaaagagtgccaccaaacccacaagcgtgcatttttccctttctgttgtatttgctggtcacgtatatctctgtgttggcgaatttccccgttgtccttccctttctcagcagtcttcttgatccatacaatgttgtctcgggttttcatttgc

SEQ ID NO: 42740 - DNA, 919 bp, Artificial sequence
  DNA replication origin
gacagggccgccgcagccgccgctgcagacagagccgccgacgccgccatgggcccgggccccgcgcaggccccgccgaccgactgacccgctcgagcgcgagcctcagggcggtgggacccgagcactagtgcacccagcgggtcgcccagagccgcggccgccccgcccccgtgttcccaaggccgagcggggctcaggcggccgctgcctcggccccacctccacgatcccgcacacgccgccccctccacacctcctcactgcggggggccacccccccgaacccccaccccgaacccccccaggccagcataggtccgccgctggcttagccacgcccccaaccgggagccgcagagaggccgtcagcgctgcgaccccgcctgctcgacgtgccccgcaggctcagctccgcccactgccccgtcccgcccacacagccccgcctctttccgggcgcctccggaggctggagtggattgaagggcggagctgccagggatcgctttgagaccatttcccagggtggagcggcagtggaggaggacaatctgggccgctacgctgattctgtatagaaagcacgtgcagaagcctctgcctgttcatatcacctcccttctcccacggtctcccctgaaaactggccagccaagccattatatctttctttaattcgcatggtgcagtaactgcgctacagagtgccatcaagcccacatgcgtgcatttttccctttctggtatatttgctggtcacgtatatctctttattggcgaatttccccattgtccttccctttctaagcactcttcttaatccattgtttgccatggtggttgcacaaggtcgtcttgggttttcatttgctcttgtttatggcctttttgtttgtttgttgccagtgtgcttaaa

SEQ ID NO: 42741 - DNA, 2527 bp, Artificial sequence
  DNA replication origin
cggggcctgcgcggggcccgggcccatggcggcgtcggcggctctgtctgcagcggcggctgcggcggccctgtctggcctggcggtgcggctgtcgcgctcagctgcggcccgaggctcgtacggcgccttctgcaaggggctcacgcgcacgctgctcaccttcttcgacctggcctggcggctgcgcatgaacttcccctacttctacatcgtggcctcggtgatgcttaacgtccgcctgcaggtgcggatcgagtgagcgccggcggcggcggcggcgaaggcccggctgaaggggcgcccgtgtccccgcccgcccccggccgggtcgccggcatgaaggaaagctgggccgcggcggggggcggaggcggggcggctcggacccctggactctagacctacgccgccagggcacgacggcccagccctggccccggctgcggtctcagcccgggggccctggatcgcgcagaaacgcactgaatgggcccctgccatcgggctccagaaactacctgggctcggccgacctgttgcctcatattggccaaagagggggaaaccagaaggagggaattctgctgcggcgacttgactttccaggcccggagcagaaaggtaggaggcgacaggttggaatgggagaggggcggtggctctgcccttcagatgtcagggcgtgttggcggtcagggggaagtatggaaggcaccggggcaaaccagccagaagagctgtggagcccaggtggggaaaggaaaggcagccgcaggctctcccctcctccccagtcatgattgcaggatagggtgaggggcggccccctcccgcccacgccccagtgcctgcctccctttctgcagaggcccccagggtgtcccctgaaccctgaggaatggagggtaatgggctgggggcggccccggaaggccctagaggagcaacgatgcccccacccttctcttccccaccagtcggtgggcatagggaggacggttctcttctaggttgagccccatatctgttctcagccctcagccctgggtctctctgcagctcctgcacagcccttggcaaaactgcctcctgccctgtctttggggccagaggactggtctctgcctgctcctgctgtcccttatgttcccctacccctacatgagggcaccccccaagctctgcatttggagacagggaagagtgggagagacgcattcctaccgtcccctcccctagtcttgctcttctgccatgtcagcccatgctccctaaggcccctagctagcaaggccctcccagggccagagtcccatcctccagccccagacggcctctagaagcctactgtgtactgaagtgatctgggaaaaggagacctgcctgagcacacagcagctctcagcctggggtgggcagagcagatggaggaggggcttgcagaggaggccattcccgggggaagcaaggacgtgtctggtggccaggcaactgaggtccccatctctttctttctctttcaggcattggcatttgtaggcggtgacccgccccttctctggccttgccaagagtcacatccctgcccaggggcacctctggccctggaacttgcctgggcagaggcagcgtgaagggcctgaacaagaggagaagaagggccttcctagtagaggcacagcatggacaaaggctcacaggggtgggggtgcccagtgatcgagtcctggcttgggaaggaaggtctgagttccctgggaactgaaatctgctagcagcactgtgagagaggtgtatttccccctcctaatgacagaggaaactgaggcttcagggaggggtggatttgcccttgacatgcagataggaggaggaggaactgcgtgtgcccctgggcctgcaggcccccacacccctccccagtcttcttcaagacctggcatggtgggaggagggagggggaagtggagaggggagcatagggctcctggggcaccaagggagagaggggcccaggggtagggaatctaggaatgtcgctttccttggagcagtacggaaagtcacagggaagatcaggaggacggacagctgagatgggagacaggagagatgagccccaggacccctggggagccaagctgtcccccacatcctagcctctcaccccacctggagcttcaccaagggctcctcagcagtgaagtggcacaagcctcccagtttggtgggcaagtgggggtgatcttggtgttgtggctcctggagacacgacataaccaggagggtgaagggataaacctggggtgggctggggctgagacccatggcatgaccccaattctctctcctcaagctcgaccccccatccccaggatcacacaggagaatctcatcctcacggcttggattgctcctgggggccccctggtgtgctgctaactggtgtacaatgctcaggagcagcccagaggggagccgggaagggaccctcgcccttaccatctatccccatttccgcatc

SEQ ID NO: 42742 - DNA, 1409 bp, Artificial sequence
  DNA replication origin
gctgagctgcaccacactgcagcgggacatgctgcaggccgagaaggccgaggtggccgaggcgctgaccaaggctgaggctggccaggtgaaactcgagctctccgtgaccaagctgagggcagaggaggcctccctgcaggactccctgtccaagctgagcgccgtcaacgagagcctggctcaggacaagttggatctgaaccgccttgtcgcccagctggaggaagaaaaggcagccctgcagggccggctgcggcaggcggagcaggaagccaccgtggcgcgggaagagcaggagcggctggaggagctgcggttggagcaggaggcggcgcggcagggcctggagggctccctgcgagtggcagaggaggtccaggaggcgctggagcagcagctccccacgctgcgccatgagcgcagccagctgcaggagcagctagcccagctctcccagcagctgagcgggcgggagcaggagctggagcaggctcggctggaggcacagtggcaggcagaggcgctagccaaggggtgcactggcctggtcatgcagctggcggccgcggagcctgaaggcaggaccctgtcagaggaggccacatgcctgcgcttggagaaggaagccctggagggcagcctgtttgaggtgcaagggcacctggttcagctcgaggcccgctgggatcagctggaagccgatgggcaggccctgctgttggccaaggagaccctgactggggagctggcgggcctgcagcagcaaataatagctacaaaggagaaagccagcctagacaaggagctgatggcccagaagctggtgcaggctgagcaggaggcccaggcctctctgagggagcagcgggcagcccatgaggaggactggcagtgagtccagcgcgaaaaggaggcagcatggcgggagctggaagccaagcgggcccagctgcagagtcagctgcagtgcgagcaggaggagctgctggcccgactggagatcgagaaggaagagctgagcgaggagattgctgccttgcagcaagagcgcgacgagggcctcctcctggccgagagcaagaagcagcaagccttgtctctgaaggggtctgaaaagactctgtcagagaagttgtcagagaagttgatgggtacgcggcacagcctggccaccatctccctggagatgcagccacagaaactagatgcccagagctggcaggagcaggaccggagcaccgtgaacgctctgatgtccaagctgagggacctatgggcccagctggaggaggctgatgtggcccacgcccaggaagtgaggaggctgcaagagcaggcccgagacctgggcaagcagcaggactcctgtcttcgagaggcagaagagcttcggacccagctgcacg

SEQ ID NO: 42743 - DNA, 821 bp, Artificial sequence
  DNA replication origin
gattgctgccttgcagcaagagcgcgacgagggcctcctcctggccgagagcaagaagcagcaagccttgtctctgaaggggtctgaaaagactctgtcagagaagttgtcagagaagttgatgggtacgcggcacagcctggccaccatctccctggagatgcagccacagaaactagatgcccagagctggcaggagcaggaccggagcaccgtgaacgctctgatgtccaagctgagggacctatgggcccagctggaggaggctgatgtggcccacgcccaggaagtgaggaggctgcaagagcaggcccgagacctgggcaagcagcaggactcctgtcttcgagaggcagaagagcttcggacccagctgcacgtgctggaggatgcccgcgaccggcttcggcgggagctgctggaggcccagcgcaagctgcgtgagagccaggagggcctcgaggtgcagcgccaggaggcgggcaagctgtggcgcagcctgggcgagggtgccaaggagcgtgaggcactgcaggccgccgtgaagaaggcagagagcgagcgcatcagcctgaagtttaccaatgaggacaaggagcagaagctggcactcctagagggcaaggaggctggggagctttggactgggctgcaggaggtggagcgctcacggctggaggcttggagggagctgcaggagctccggcgtcagatgaagatgctggacagtgagaataccagagtgggccgcgagttggcggagctgcagggccgcctggtgctgggctagcaggcagagaaggagagccggcgggagatcc

SEQ ID NO: 42744 - DNA, 1519 bp, Artificial sequence
  DNA replication origin
cgcgagttggcggagctgcagggccgcctggtgctgggctagcaggcagagaaggagagccggcgggagatcctgcgcctccggcagaggctgctgaagggcgaggacagcctggaggcgacgcggcaggagctccaggtagcccagcggaagctgcaggaacaagaaggcgagttccggacccgcgagcgaggcctgctgggcttcctggaggaggtgcgcggcaccgaaaagcagcagctggaccacgcccgcggcctggagcacaagctggaggcggcgcgggccgaggctgcggagctgggcctgtggctgagcgcggccgagagccgggcacaagacctggaggccgagctggcccgcgtggaggtgcagcggtgcgcggtggaggcccagctgggcggcctgcgctcggttctgtgccggggcctcgccctgggtcgcgcgcccagcccagtccagccccgccaccaatgcccggctcccctgcccgggacgcgcccgctggaggaagcggggaaaggctaggccgccccagcaccttagaatgcagccctgggtcccagccaccatttccaggacctaccacctccccggctcctctagacctggacccagaggcagtgcgcggggccctccgggaatttctgcaggagcggcggagcgccctgagagaacaggacgaacttcggacccagagtgccctgaatcgccaactggccaagatggaggctgagagggacaccacaacctcgaaggccaggcagctgcagaaggccagagtggctacagtggctgagagtgagaaagccctgcgcagtgtggatggacggctgagccgggtccaggaggagctggcgctgcaggaggagagtgtgcggcgcagtgagcgggagcgccagggccacagtggactaggtggccgcactggagagaagcctgcaggccactgagagcgagctccgggccagtcgggagaagatcagcaagatgaaggccaacaagaggaagctggagggcgacaagtggtgcctgaaggagatgctggacgcctccgagggcctcaccgtcaagctggaactgcagcggccctcgcttgagggggagccgtagcgcagccacctgggcctgagcggccacgaggcccaagcccaggccctccagaatcggatggactccctgcagagacaggtggcagacagcgaggtgaaggcaggaatcctgcagctgacagtggagtggctgaatggggccctggccaaggtggaggaaagggaggggctcctgcacgtcaaggtgcggggcctgacagaggccctggcctagagcagcgccagcctcaacagcacccaggacaagaacctgcatctgcagaaggctctgaccgcctgtgaacatgactgccaagtgctcctggaacggctggacgctgccaggcagacattgtctgaggcagggaagcagagcagctcccttggcgagcaggtgcagacgttgccaggcgaggtggctgacctgg

SEQ ID NO: 42745 - DNA, 1425 bp, Artificial sequence
  DNA replication origin
gagacaggtggcagacagcgaggtgaaggcaggaatcctgcagctgacagtggagtggctgaatggggccctggccaaggtggaggaaagggaggggctcctgcacgtcaaggtgcggggcctgacagaggccctggcctagagcagcgccagcctcaacagcacccaggacaagaacctgcatctgcagaaggctctgaccgcctgtgaacatgactgccaagtgctcctggaacggctggacgctgccaggcagacattgtctgaggcagggaagcagagcagctcccttggcgagcaggtgcagacgttgccaggcgaggtggctgacctggagctgcagtgggccgaggccgagggccagctacaacagcttcaggaggtgctgcagcagtggcaggagggcgaggctgcagtcctgcacacggtcctgaagctgcaggacgagcagaggatgctgcaggaaagcctgggcagcctgcagcgcaccctggctcagctggaagccgagaggcgggaggtggagcgctcagccctgcagctggagaaggaccctggggccctcaggagggcactggacaaggtggagcgagagaagcttcgcagtcataaggacacagtgccgctgagcccagagaagggccgcctgacctggaccctcatgggggctgagctggagctggccgaggcccagaggcagatctagcagctagaggcgcaggtggtggcgctggagcagagccacagcccagcccagctggaggtggacgcacagcagcagcagcagctggagctgcagtagaaggtggagcgcctgtgcagtgcccaggcacaggctgaacgtaccctggaggcatgggagcgggcccaccgccagagggtgcactagctggaggagcaggtgtccacactgaagggaccaaagttgcagcaggagcttcaaggagctcagcacccttctcccaccctcaggcccccccagagaaataagcccctgctggcatctggagaatggccctgtgcccgggacaggggagggccctcctcttggacaccccacccagagcatggtcccttgggggcctcgagctgaggtggaatgaggaggagccccactggcagtgctgaggagaggtactccagctccaggcctggagagccttcccggcatcgcctgcggaccccacctcagtccagccccctcttccaggatgagccattgtagatcatagaaggtcttccttgagaggttgagccagggttcgggagagcccttgtctctggtcagccttggagcatgggctcgtgggaaagaggaaggggacggggcacagggcaaggatcagaggcccaggcttccagagatctctccgccttagttcagagtgtgtgtcaggaaattcctcagagagctcagagccccta

SEQ ID NO: 42746 - DNA, 1132 bp, Artificial sequence
  DNA replication origin
gaatgcaaggccagcaaccaactcacaaatactgatcaagacgggggagggatctaaaggaatgtgagtacgtcctgccaggaaagaagtttgctgcttctgaaatattttcgtcttcgccactggcaggattgatcgattgcagttagcgaagaattttctgtgcaaactgtccaagcatctgcttctgtacttctgtacaactgttgctcaaattcactcttcttttcgaatcaccatctttgaagagagacagaaaaatccatttaaaccacccgaactaatcattcgaactgcttccaagtcctttaaaggagaatcctagcgagggtccgtaacacttccccttaccctctgcctgggttcaaacttcaactcccagggttcgcccaagtccctcccctagtcctgtcatctaatgaatatgcaaataccacataattggcagccaatggcatgggttctggtcacatggtgccgatggtaggtgagcagacagaagttgtcagtgaacagagacggcgctcagtctggggcgagcgctctagtgagcgcggacggatgcttaggcagtagtcctggcagcggcagtagtggtggcagcagaagagaggaagggggagggccccgagggctacacacgctcacactttcaagttcccttggagggagaggaggtggggctgcagaaagaggaggccaggagcggtcccatccgtcccgtcccgtcccgtctccccctcttcctcttgctccttgctccccggctctgcgagagttgagggttcaggtggccgtacgcggcagtgagggcaagagggccgggagagtggggagcggaggcaggagtgcgggggaagatgcccatcctgctgttcctcatagacacgtccgcctctatgaaccagcgcactgacctgggcacctcttatttggacattgccaaaggcgctgtggagttattcttgaaggtaaagggaggggaggggagagatggggagagctcccgagggatttcagggtgtggattgaggtgcttctgtaacgtttgtatcgccctcccccctcctttcctacgcgaccccctccgtcatcccttgccccgcagctgcgcgcccgggacccggccagc

SEQ ID NO: 42747 - DNA, 760 bp, Artificial sequence
  DNA replication origin
cacaacttcactgccattttgtgaggtgccgccgtctctcctccagcaaggtcaggacttcaggactgtgagtgggcagtttttccctggatgctttaatttcgccctggaaagtgtcctttttcctcagaaagagtcttttctgtggtgttctctgtccggtgtgtgggagggctcccttggggaagtggcttagctctggggacaccgccatgggcgcctgtgtcagccgcgggggagcgttttccttgggcaccccgtctcggctatgttgtggggccagggggcttttcttgggggctcttgttgggggctccctgtcggtgatggaaaaggcgacttttcctgctgaaatgacctgagcccggggggtgggggccatgccttggttgcctgtgtcggtctcgggtgcggcggtgtttctttcccgctcagtcgctgtcctgaggggggactctgccctggggtcactatctgtgctcatggaacgtggtgggggtggctgtgccccggacacatgatcgtagccctgtggggtcactgtcgggggctttatctcaacctctggtggactcttccttgggtactgatgtcggccgtgaggcgcatttgtcctcggatgttgctcgctctcagttacaatgtgttggcttttctttggttctgcttatccccgttgtggacgcttactggatggatgctttctcttggtgctgggtttttaaaattattatctgtaggtgctctctcccggtgccgc

SEQ ID NO: 42748 - DNA, 891 bp, Artificial sequence
  DNA replication origin
tactcagtctctgcctggacagcccaagagtgcccaagatgttgtccacttggttgtcgtgggaccatgagcaaccagagtcctcaatctcacaactgtgcctgatctgccccatgctggatctgacatcacttgtcctggattcctggagactcctattctgaaccctctcccagacacctccttccaaccttcctgcaatttcaggtgccacactctctccaaattcaaactccgaaccttccactgggaactcctgcactgattttcttagtcaccccaaactgtaaggtctcaaaggaccattaatctgacactcggtccgatggtcccttagaagtgcgcccacacaccgcccctagggttccacaccgaagcggtccccgtgccccaggcacttacgctgcgcagcggaaaaggcggcgtgggctagggcaaagagaccgatgcccaccagccccttccacagcgacggcgccatgatgccgaaggagcagcagcccagcaaaagaagcgaaggacggcggagctgtttcttcttccaccggcgggtgtccgcgcgccgcagaaagatgacgtcactgaagtcctgagcgcaaagtgtctcagtggtggaaaagccagagggctgtgagaaaacggaaacaggaatgccgggaagaagcagaaagctacacggaaaaaggtccgcgagaacccacgaacctgcgctatggaggcctctctaggagggccggagcccaacggagtcataaacgaagaggcgaaagcgggagctacggggaagcgaagaggaagggcgccggcaaatgggggcagggccagtggcgagaacagggtggggcagagggacgggggcctgcgtagagaacgtgtgggggcgaggggcgg

SEQ ID NO: 42749 - DNA, 1228 bp, Artificial sequence
  DNA replication origin
ccagtggcgagaacagggtggggcagagggacgggggcctgcgtagagaacgtgtgggggcgaggggcggggtaggcagacgggcggggtggggaagacgcgcggggcccgcacgagggtgggtgtagccgaggggcggggccagtgggtgggtgggtgggcgtagccggggggggggggccctggtgggtgcggtcgagtggcggggcctgcggggaggatgggtggggccgaggggcggggaggaggtggggccgaggggcggggaggaggtggggccgaggggcggggaggaggtggggccgagggcggggcctacgggaggatgggtggggcgtagggggcggggcggaggggacggagagtgggtgagggccgagggggcggggaggaggtgggaccgaggggcggggaggaggtgggaccgagggggcgcggaggagtgggaccgagggggcggggaggaggtggggccgaggggcgggaggaggtggggccgaggggcggggctgggggcgttggggaaaggcggtaggtgctggatatagacccctgacagttgtgttttgtgggttggttggttttggctttttgtgaaactgtgccttttgttttctgtaggcctttcctgtgcttcagctccctggaaactggcactgcagaaggaggcaagggtgttaaaacgaggaggcagtgtcaggacaaaatcccaggatctggaaccccaaatacttggctcgcgggaagtgctcagtaaaccattttaaggtcctggagaaagattcgcgcaaaaagaggtgtagcgcggggggagtgttttgtcgtgaaaagaaccagcttacattaaggaagaaatgaaagaggaaattttaaaatgctaataacgcagccttcttgccttgtctctatctctgatccgggtaaaatgtatactcctctgcccatttttctttgtcttcatctcctgaaatgtagacatttaatagtgagcttctccccttgacctcatcactctgctgtcccctggggagctcacccattcattcccaccgcttcagccagcaaaggtattacagtgattccaaatcgacatctctatcacaaatatctctccttagctccagggctgcatttctgactaccagataggcatttatttcctgtggcacttaaaacgtaatatggctaaaatggaattcatcctttttttccaaattctgcaccagtt

SEQ ID NO: 42750 - DNA, 933 bp, Artificial sequence
  DNA replication origin
atacttctggaaggaccttaactcttcctcgtcctcacttttgtatgcctgaattggaagggtcaaccacaggtatccatatcagatattagaggcatagtacaataaatgggatgtcattaaaaatgccctaagccttctgtagcctatttcacgttcgggttttttttttcggactccacaagaataagattttcctttgcaacctcgaaaggacagggcgtagcaggagctaggtgttgagtaaaggtcgactctggctccaaaagaacgccagattctgggcagtagagatactactgcagtttcaatgaaccttaaacaaactgacaccccagagaaatggatcgcaatggtgtctcccctcccccagcccccagcccaattccagacaccgcgcccactcgttttccatcctcagccccgggtcccgagcttggtaggcagggaaagggtggggggctgggggtgcggaggaaaaagggggtggggtcggaagcgaaaaaggtgtggagaggcagataaaatggggcgcgaggctgaagaggaaagggggtgaggcagagaaacgcggggtagggggaaggcgaggcagaaaatggaaggaattagaaggggagccgaacgtaggccgagcagggccagcagaggaggcgaagcagccggcgggcagagaaaggggcagcgccaaggggctgacaagggttgaggaacttgccataaatcatagccaggccggtttcgtgcaggaagcgggcccggcggtgcttgaagagccagattgtgagaatggtgagggtgagcagcaggatgaagatgagcaggttggcgctgtcctgccggtggctctcctcggcttgcttctcggacacgatctcctcgtccatggctctagcctctccgccgccgccgtccgaagcccctgcccagtca

SEQ ID NO: 42751 - DNA, 1396 bp, Artificial sequence
  DNA replication origin
tcatggccttcacacttgctgttccctgtctagaatattctcagatatcttcatggcttgcttccttacttcactcaggtctctgtccaaatgtaccatcttagacaagaggcctttcctcaccatcctaaatggcataactccacatccgtctctatggccttgatctgctttagtttttatgtaaaggcatcatcgccacctgacatatgtatctgtgtattacatgtctccccttcattagaacgtaagctccatgagagcagggctttttatctcttttgtgaactgctgtatccctgatgcctagaactgtaggtgtttgagatgtatttcctgagtgaacaaatgaatggacagaccagatgagtagagaagtaaacattcctttgcaaagcagtgtgatcagtgctaggagagctttataccgggtgttgtgggaatccctagtctgacttgggggtggagtgggggtaagaattattaatgaaaatttcttagagcaagtcacatctgagttgaatcctgcagaatgagtgggagttttcaggcctagaaagtgaggaaagggtattccagggagattaaaacagtgctgcaaagtcctatatgccagaagcttcagaaattttagatagttcagagtgacagaaaggaaaaaaagaaagatggagggagggagggaaagaacgaggcaggaaggaagggaaaggaggaggagaaggaggaaaggcaaggaaaaggaggaaggggagggatggagtgaggaaggaagaggagagagaggaggagggaggggaggaaggaagggagagagaaaggaagaaaggaaagaaggaaggaagggaggaaggaaggaagaaaaggaagaagagagagggagagaaggaggaagaagagggaaggagagagggagggaagaaagaggagggagggaagaaagaggagggagggaggaagaaaggaggggaggaaatctgtgctctcaaggagctcatgatttagtactaggggataaccatgtaaacaattgaaaatcagtttgattaaattggtggtagagctatattcagggtggagtaggaacacacagggaagggggtcctccttctttgaagggaggaggagccctggagggaaagagaaggcttaccagagagtattgaaggcctgactcttcaccaggcagatggaggggagaaggcccagtggaaggagagagaacaagacttgcaaggacatagggctgtgagagcagagtggcctttggaggttcctgggcatagaggcctttggggccacagtaaggggtctggattgtattccagcaacagtgggagccactgaaggactttaagtggagaggggtgagggaaatgttacagattcaggatta

SEQ ID NO: 42752 - DNA, 1534 bp, Artificial sequence
  DNA replication origin
aagaaagcgggcttactgcgtggggatgctcgcccgcgcagctgtctcggcggcggcggccgctgcctgcaccgaggccgaggcgcggcggtggcggcggcggctgcggactgagccccctccgccgggcggtggatgtagggcgcgggaggggcgcgaggggaggggtgcgcgcctgggaggcggggagggaaagaggggaggaagcaggagcgcgggggcgggcgcggctagccaggggcggggcggggcgcgcgcggggccgggctctgcccactgcacggaggctgtgtgcggggcgcgcgcgcgggagacggccggacgggcgtggggagaggggcggcttgccacgcaccccgcgcgcccacgtgcccccgccactggagagggccgggcacgcggagagggtggctgcggggacgcggtggcaggctctttcccgaggaccggctcggatccgaagaccgggaggagggcgggccgggggcgcctcgggccccctccctcgcgcagcggtccttagaggcctgcgggagtcacgaatcactgcaggcggctggggctggggaggtgggagcaacaaagacagccaagtgagggtggcgtctcgcctcaccggggtcctcgctaacctgcgcactccctgaaaagcggccccgcttcggggcccacgccgtttcggcctccgacttcggaacccggtggcttgcagcggcgccgaaaggcccaccgacgacccctccccttagtagcaagccggagggagctaaataagccccatccataatcccagtgccaccatccagagcgttttaacgtcactcagaaagcaccgatggcaaagcggcgcgtggcgtctcattcactcagcattcagtttactgagccctcgccatgtgccaagctcagtgccgggctctggtgataacagcgttgtctgcagacagtacgcaccctgccctgggagcttgtaatctagtgggggagacagacaataaagaagtgagaaaataatcaaatttggataaagcctgtgcaggaaaagtacaaatagtgtgattaggaaaggaggaggtgacatttaagctgaaccctgaaagatatgaaagagccaggaaaaagctttccagaaaacaagtcagaaggagggaccaaatcttgatgctttggaactaaaaggtggtgatcatgattggcgccaggaaagctggggagagtaccagaaagtaaggctggacaggttggcagggaccagatcgtggattgcatactagtccatgggcaggtgcagtccatgggcaggccacttcattccaaaatcaatgggagggcattgaatgagtggcttaaccccaaggcgtgacacggtctgacttatatttcttttaactaaacttttgtcttttgggatgattgtagattcacatgcatttgtaagaaataatacagagagatctggggtcccccttgcccaatttcccccaatgcaagactacactataagataactagaatattgacattaatacaatct

SEQ ID NO: 42753 - DNA, 1930 bp, Artificial sequence
  DNA replication origin
tgggcagagcccggccccgcgcgcgccccgccccgcccctggctagccgcgcccgcccccgcgctcctgcttcctcccctctttccctccccgcctcccaggcgcgcacccctcccctcgcgcccctcccgcgccctacatccaccgcccggcggagggggctcagtccgcagccgccgccgccaccgccgcgcctcggcctcggtgcaggcagcggccgccgccgccgagacagctgcgcgggcgagcatccccacgcagtaagcccgctttctttccgcttgtgcgcgcgtgtgtgcctcccgcccgccggcgtcctgggtcccgggggagcggctgcccttctgccccgccgccgccgccgctcggggctggtccctgcggtcccggctgcctggccttccagggctgggtactgcggcttcggcggcctcgctgaggccgggggccaggggccgtcccgggctgcggggtgcgggacgagggactgcgagtgcgaggtcccccctggtgcgtgcctcggccttccctgggtttttggctcgatggggactaagaggcagtggggtggaggtgggggggatcgggagtgaaatgggggctctccatgttttcctgtgcgggggatggtggggagtgaggagggagtgaagggggggccctggttttgtcaccaaggatggcgggcagtggggggtggggcgaggtggggacacctcttggttctttcagccaggatagctagcaggggctgtggggagcgggtgaggatgaagcggtgggtcgactcccttggttttcccatcaaggatggcggggatcgtggaggggggagatgggagacctgccttgcttcgctcaacgaggatggcgggggtggcgacgaggagtagacgtgagggggcccgcctcggttttcttgactgggatgcttgtggggtggttggaggatgggggtggggtgcagaataaggagggagggggagggcccgctgtggttcttctgtccaagggggatggcgcgggtttggcgaatgggggtggggagggggtatttcagctccagcgtggaatctagagaagcacgaggaaggttctatcacgggggttgagccttagaaggtgggttttcaaaactgcagggcgtgacctctcccgcctcgaaaaacgtgaaatccttacaaggtgccgtctgttctaggctctgggacagaggtttctgctttcgaagtttctcttcctttcctctctgctcttagcgtccaggactaggtaaaggttaaaaaatcatcaaggctaagcgactgttgtgtcgttcgtgttgagcgctgtattattttctgcatttgggaatgtgcgagtttctcaggtttgttttgattgccttttacaataaaaaccccatactagggagatcccttaggaaaagaaaaggacaaggcttattaatgggatgccaggtttggattttgaatttcctgaagggcaggagatacatccttgtagcatttcgcttggttttgagaagagtagaagtagtagaataagcgtatgtatttgctggaagtccccttgtattcatttaaattatcccttcgggattatccgagccccctttgatttgggtttggaatagatccagttttcctaattggagccatcatcttgtaattgcttgtaattcttctctgggttatcaagtctatggcaagcttatagaacagcaggaataattttttccgtcatcttaagacagttttaatgtaaacgttacggtgttccttgcaaatgtgaacatttgcagaatagcacaagtttaaattatgggcccccctggaattttgtaaagcctttcctgcctcagctcatctccaagaaccgggccctcccgatccttacactgaagaagcaagagcttctgggatggtag

SEQ ID NO: 42754 - DNA, 1087 bp, Artificial sequence
  DNA replication origin
cgtgagttgcctcgcgccgcgtccgcggggctcagaccgttggcagcggcagttcgaccgttggcggcgggactcaggcggctcgcggcgtcggctgacaatttcaaccccccgcccccgcccctgtcccatcccagggcactccggcgggggtgaggggaggaccagatagcacgaggcgactccagggaaaagttttgtggcgcccgctgcgccgctccgacggcccggggactgcgggaaccctgcctcccacgcgggcccgaaccacccccgggagccacccgcccgctcacccatccgtgcccgcagctctctcaaggatgggctgccgccagcgccagctgcggcgccgtccgccatcatcggagtcgggaccggaggcggtggtggctctccgcatacattgcgcaggcgtcggcgcggcctccgcttgggtcgtggccgggctgccggtgggcggggcggggcggggcggggcggggcggggcccgaagggccaccgcgcccgcctcggacctgcgaaccgggcaggattgccccttgcgtcccacgtcctgaccggctgggcagcgactacctggtctaaagaaaccctctcctatgttccgtgctctgcccctactgcattgtgaggactagccaatcagcacccagcttggcccccccaacattcctttcttcacctttacctagcaacacagtaacattccttcctcattcattcattcatttaaagaacatttacggcgtgcctcctgggtgcgcttgtatcatgagtttactagtccttgaaacattacacaaagaaagacccaagttgggggaagaagcctagggagaggttgggagtcgcaggcttgctttgaggtgctaggggccccatcatgagtaggcttccctaaactgttgcacaataaatcatgacacataggtctcaaagttgggtgaaatatctttaagatgtttgtgagtcttcaaagagaggcagaggacttattggcatcaatctctccggattttgggagagactctaccaggttgcagaatgtttttcccattcacaaggaaaaccgtcattggcctg

SEQ ID NO: 42755 - DNA, 1041 bp, Artificial sequence
  DNA replication origin
ccccctttaaagcacagaggccccactcaccttcaggatgtctggctctgggatgatgtgaccagaccactggccatagctaaaaggagctaaggcagattgcacatgccatcactgccaggcaaagtgagccactttcctggaggcgttccactggtcccctggcaaagtgccagggtacccaatactgagagctactacctggtgatctaagagccgagacagcttcacagacataaaaataagggaaggaaggcagagaaggaaggagagtggcaagaagggagggagagaggaagaaggggaggaatgaagggaggaagggagggaggaatgaagggaagaaggggaggaatgaagggaggaagggagggaggaatgaagggaagaaggggagaaatgaagggaggaagggagggaggaaaaaaggaagggagggaggaaaagaggaaggaaggaaggaagggagggagagagagaggcaggaaggaaggaaggaaggaagggtaggtgggaaggagggtgggagggagagagggactggactcacaccacgacttccactctcctgtcccaagcagacacagagggctgcagccaccttaaccttagtctcttctaagcagtttagggctgggccacgtcctgctcaccaggcttcccctgagtgccgggaggatcccagggaagggtcagtttaggtcatccttgctttgctgcacaaagacatggttgggaacacactacaaagcaggccctacaaaattcaagaaatctgagccaagcacccctgttcatcacaaattatcacatgtgtatttctgccctgatacctgctggcccttgagaggggcagtctttcaatggagaccccatggttagagataatacacatccaccctatccagcagggaaaagtcacccttgacctaaggcatccactgaagtctgctaagaggtaaggtcacggtctacactaaaaaagccccaggacataaagcctgtgaggagagaacaaggggcactggagaaggggtcatg

SEQ ID NO: 42756 - DNA, 1009 bp, Artificial sequence
  DNA replication origin
cccccctctctgcccgcccaccgcgcgcgcgcgctgatgctgtgagctcggccgcgccgccgcccacctggcttgctccgccgggcctcggcaccgccgctaggtccagggcgctgcgggagcgcgcaggcgcgctgccgccgccgccaccgccgccgccgccgaccggatctgaggcgactgcggctccctcggcaacgtcaggaaattacttctaaactaagccctgctcaggccgacgcagccgccattgtcggcgcgtggcgacgtcgcgggtcgcgccgacacgcccactatggcgtcaaaaagcgccgacgccggcatgcggcgcgaggcccggggaggcggggcgccggggttggggggacccgctgctgctgcgcgtcgacgcccaccggggtcgggtttggggcggggcgagggccactgggatcccgcggcgcctcaagggccttgagctccgcggggtccccggcggatcggccggcccgggagggaaacggaaggaaggcgtgggaatattccctcgcgggggtggccgggcgggtttcgcgagggcgccatcttaggggagtgggtggggcggacaggacaaatttctctggcttcgagaaaacgacgcgcctccttcgcccaaaggcccctcccccgctcaggaaccgcgtcttttacttgtttctttacgacacccggggatagacaccggatcttgttcatcttggtagcctaaactcctggcaccggctctggtgtctaatgcggaatgagcgaatgaatgaacgaatgaggggtagaagggccaactttctttttctggtgtcagccttctcctttatcggtctcataccttcctctggctggagttcgactccgtgggaaggatggaaagggcagcagttgcctgcctcttgtactgcagatttcagtggcgctcgagcttcgaacttgaaacttaagcataaatgtaaacatcccagtgtaaacaccagctttattggccgggaaactc

SEQ ID NO: 42757 - DNA, 1122 bp, Artificial sequence
  DNA replication origin
cctcgccccgccccaaacccgaccccggtgggcgtcgacgcgcagcagcagcgggtccccccaaccccggcgccccgcctccccgggcctcgcgccgcatgccggcgtcggcgctttttgacgccatagtgggcgtgtcggcgcgacccgcgacgtcgccacgcgccgacaatggcggctgcgtcggcctgagcagggcttagtttagaagtaatttcctgacgttgccgagggagccgcagtcgcctcagatccggtcggcggcggcggcggtggcggcggcggcagcgcgcctgcgcgctcccgcagcgccctggacctagcggcggtgccgaggcccggcggagcaagccaggtgggcggcggcgcggccgagctcacagcatcagcgcgcgcgcgcggtgggcgggcagagaggggggcggtgcagccgccgagcggccgcgatttcccggggactgctggggcgcagcggggaggcgggccggggggcggcggggcgcgagcagagcgcggttgacctccctttctctgctcagctccagcgtcatttcggcctcttagttcttctgaaccctgctcctgagctaggtaggaaacatgagcggcaccaacttggatgggaacgatgagtttgatgagcagttgcgaatgcaagaattgtacggagacggcaaggatggtgacacccagaccgatgccggcggagaacccgattctctcgggcagcagccgacggacactccctacgagtgggacctggacaaaaaggcttggttccccaaggtaggagagtgccacgggcgccactgcagagcgggccgcctggccagcctcgcggggcactccttttacgtttgctttgctgagatccttggtccttggtcctagcccccttgaatagcgacgcttctttttgttgtgtttgttggggcaccgatgtgtaaaagaacgtaaatctttagggtagtgtcttaaatgtaatttttaagtcttttctatgctttattaatcttgtctgtgaaggtcacagttgattattacatgactgctttttattgcaaagaggaaaaataccaagaacaaatttagtagctgtccatttctggtagccaaccccac

SEQ ID NO: 42758 - DNA, 1576 bp, Artificial sequence
  DNA replication origin
gttccagatgttactaatcatgtttctttgttagggagcctgctgaaataaagaataaagagcaaggagtagatataaacagtcagagaaaaggcaaataaaaaatataaaaaggatgctatttcttacatgtgtttggcaagaggtttgctcaaaacactgctatcaatatttctcacagggaaaggcaagctccaggtttgaaaagtaaacatgctgcacctagaactagcctttaaaaactcctagaaccttaaagttggctaagtctatagtcagatggcaccagcaccattctcaactttgtgtgcatttgtgatgccttctaccagaatacccccctacaccctagattaggcaactagagatcagaacataagtcttatttattaatactttttgaattgattacttgcaagaaaaattccttttgagtcagcttacaatgaaaacaacgaggctactaaggaagggagccaagaaattactggtggttgagggacacgctgaagaggaattgtgccaggaatccctggctaaagaaaagtaataatgatgacagttaccatttattgaaagcttactatgtgcaaggtgccgtcgtaagtgcttttcatgtactatctcattttattctcacaaatctctagaagtaaataacactatgtttgcagagaaaggacccaggagacccaagtggattaacaagaattaggggggtaagagtgtgagaccatatgagtgaggggtaacacagcatggtggggatgtatttaagaaagaccacaatgagtgtatgtgtccagaatggaagattgtgtaagaacacgagggaaagggtggagggaagggaagggttacagatgctgagagggaaccgaaggcgttggggaggaggggaggagttagttgaggcaggagagaagccaaaagggaggtggaggagcagccaatagggagggaagtgggaaggacttagaggaaggaggaggagcagtaaaaaggaaaacagaagagcagaggggaagagactagaaaaagcagcagtgaggaggaaggtaaaggagaagagagggaggggtagggagaggagccgagagggaggggaaagagaaggagatgggagagggcgtagcatccaggagaaaggaggagggggaggagccgagagagcactggcagaacaaaaagagactgggtaaggagtcgataagggggggaaggggaggagccaagataagaaggtggggccgaaacagtaggcgttggagccgagagggagaaggaagaagacgagatgagagggaagggagggagcagaaaaagaagaggaaggggaggaactgtgaggaaggaggagatactgagagggcgggaaagatccgcgaagtgggagactccgagattgaaagcccctgagacatacccacagggaaggcaatggcattccgggtccaagtccatgagctctcggccctggtcgtcccctatcggccctatacccctacccgaagccttcccctcacatctctctcactccctccaatcctcacctgacaaaatgcgatttctcgct

SEQ ID NO: 42759 - DNA, 1469 bp, Artificial sequence
  DNA replication origin
ccccgttcgggaggttaggagcgcctctgcccggcagcccctactgggaagtgaggagcccctctgcccggccagccgccccgtccgggagggaggtggggggggtcagccccctgcccggccagccgccccgtccgggaggtgaggggcgcctctgcccggccgcccctactgggaagtgaggatcccctctgcccggccagccgccccgtccgggaaggaggtgggggggtcagccccccgcccggccagccgccccgtccgggagggaggtgggggggtcagccccccgcccggccagccaccccgttcgggaggttaggggcgcctctgcccggcagcccctactgggaagtgaggagcccctctgcccggccagccgccccgtccgggagggaggtgggggggtcagccccctgcccggccagctgccccgtccgggaggtgaggggcgcctctgcccggccgcccctactgggaagtgaggagcccctctgcccagccaccaccccgtctgggaggtgtacccaacagctcattgagaactggccatgatgacaatggcggttttgtggaatagaaaggggggaaaggcggggaaaggattgagaaatcggatggttgccatgtctgtgtagaaagaggtagacacgggagacttttcattttgttctgtactaagaaaaattcttctgccttgtgatcctgttgatcggtgaccctaaccccaaccctgtgctctctgaaacatgtgctgtgtccactcagggttaaatggattaagggtggtgcaagatgtgctttgttaaacagatgcttgaaggcagcgtgctcgttaagagtcatcaccactccctaatctcaactacccagggacacaaacactgcggaaggccgcagggtcctctgcataggaaaaccagagacctttgttcacttgtttatctgctgaccctccctccactattgtcctatgaccctgccaaatccccctctgtgagaaacacccaagaatgatcaattaaaaaaaaaaaaaaaaaaaaaagcctgcttgccaggttggcccttggtttgcatctgggaatttggcatttagtcatttcctgactgatgtagactggtttgctatgcctagactgtacagacaatgtgatttatggtcgatacttgctttcctttggggagtccggaattttgtagttgctaggcagagggtgcctatgtgactactccccataaaaaccttggatgctgaaatctctaacgggcttccctgggcagaacattgcatatttattactgcatttctcactgctggagaaagaagcatactcagtgtgctctctaatgggagggaacaacataggaaggctgcgcctggatttctccaggctccacctgtctttttccctcactgatcctgtgggcatcctttctgtagcctacccatgtatgcatctgtatgccca

SEQ ID NO: 42760 - DNA, 1251 bp, Artificial sequence
  DNA replication origin
ccctcccggacggggcggctggccgggtggggggctgacccccccaccttcctcccggatggggcggctggccgggggggggactgaccccccccacctccctcccggacggggcggctggccgggcagggggctgacccccccaccttcctcccggacggggcggctggccgggggggggactgacccccccccacctccctcccggacggtgcggctggccgggcggggggctgacccccccacctccctcccggacggggcggctggccgggcggggggctgacccccccacctccctcccggacggggcggctggccgggcggggggctgacacccccacctccctcccggacggggcggctggcctggcggggggctgaccccccacctccctcccggatggggtggctgccgggcagagacgctcctcacttcccagacggggtggctgccggacggaggggctcctcacttctcatatggggcagttgccaggtggagggtctcctcacttctcagatggggcggctgggcagagacgctcctcacttcccagacggggtcgcggccgggtagaggcgctcctcacatcccagacggggcggcggggcagaggcgctccccacatcttagacgatgggcggccgggcagagacgctcctcacttcctagatgggatggcggctgggaagaggcgctcctcacttcctagatgggatggtggccgggcagagacgctcctcactttccagactgggtagccaggcagaggggctcctcacgtcccagacgatgggcggccaggcagagacgctcctcacttcccagacggggtggcggccgggcagaggctgcaatcttggcactttgggaggccaaggcaggcggctgggaggtggaggttgtagcgagccgagatcacgccactgcactccagcctgggcaccattgagcactgagtgaaccagactccgtctgcaatcccggcacctcgggaggccgaggctggtggatcactcgcagttcggagctggagaccagcccggccaacacagcgaaaccccgtctccaccaaaaaaatacgaaaaccagtcaggcgtggtggcgcgcgcctgcaatcgcaggcactcggcaggctgaggcaggagaatcaggcagggaggctgcagtgagccgagatggcagcagtacagtccagcttcggctcggcatcagtgggagaccgtggaaagagagggagagggaaa

SEQ ID NO: 42761 - DNA, 2042 bp, Artificial sequence
  DNA replication origin
ccgctccctgggctgcggcggcctcgtgcgtcacgggcgcaggcgggggccgaggggagggcggcaccgcaaggtgagggcaccgcgctgccttaagacgccgcgcgcccccgctgcctctcagagcttgcagcgcggcgcgctggccggacgtgcgggcacagacgctgtgccccgctcctgccgcgcccgcagcgcccgctgccccgtgccagctcgcagccgcccgagccccgagaggcggccgggacgagcgcgaggagccccgaaggacctgcacgcggcgcccgcgacgccacgtctgcagcagcaacaggtaagcagcccggccctactccgggctccgtggcccccagcacccggcagggccccgagcctgggagcccacgacgccccctctgaagcgtcccgacggctgctgagctaccaggcgcggtggcccgcggtgcggccccttctcgcctttccctagccatcctcccgccctcgcgttttctctctcactttttctcgtgcgttcttttcccccttcctctccattctctcgttttttcctcatcctttccctcttcctctgcttgttctcttttcttattattttttgctttttctgtctgcgtctctcccagtctgtcttgctctctcattctctctcactctcacgctcccatttcttcttttttctttctttctccctctctgttgctcacattctctctgtctctctgtatgtatctcattctttcgctgtctctcatttcctttttgtctctctgcctctcagtctctctcgccctgcctttctgactctctccaccaccctgcacccctgcctcttttgcctttctccccagctcctttcccactcccctcggctgtcaccgacaccaagcagatccggagaaagcaaagaggatgccaaattgggaatggggatggggctgtggagggtgagggtaggggagctcaataggcatcctctctgcattttccagtctccattgcactgctgataaactaagggttttttaaccaaagcccgcggtggccggggcggcaggtggtttccacggcaaaataaagtccacagggagacagagatccaaagagacagagatccagccagagaaaaaccaaggtgaggggccatgggaaaaagatgtagagaaatagagatgcgcacacactcaaagatacaaagcaagtgtttagccagagtcctggggtgacaggaaagtgaaggacagagaaaccaacgagagagtgcacacactaaagagatagcttgagagacaggtgagacaagcagtagagtgttagagatcaatggagagagaggcagagtaatgcagagagaacttaggcagggagagacagaaaccacacggagagacacagagacaagagggtccgagaaagacagagcaagcgcacacgtgccagtgagagacagaaggagacacccagagaacccgagggagacgcagaaacaagagagttggagagacacggagacgggcagagacacagcgaacgacattgaacaggtgcgctagggacccacaaagatgaactgctggggaaatagactgagagagaaatggagagacaagagagcactagggaaagacggagacacacatgaactagcgagcgacacagtgacaggcagagacacagagagacagaatggatcagaaagagactgagggagagacgggcaagactgtgagaaagatagggagcgagagcgcaagccctgcagagaaagtgcgctagcgaaagagacacacacagagagactgagtgacaaacagagtggaagagataaatgagagtaacaggaaagagacagcgtgcacgtgctatcgagagacggagaaacagagacagacataagtgagagacaaggatgagaaagaatcaggaaacggtgagacacatacagacacacaacccgagagataaagaaaaaaagtgcgctagcgagagacactggagaagagacagaaactgacggtcgtaaacagacagaaacagag

SEQ ID NO: 42762 - DNA, 1476 bp, Artificial sequence
  DNA replication origin
aaaatgtggactataactcagtacaataacaagcttttaaaatagaacttaaaaggagccccttttctgagagcatgaaaagtaattggaaatacattttgagtgcttcctagatccctagctctcctggggtgtgctttaggatgtgtcacttttctcacatgcctcttcctaccctccccccaccagagctgccttgggagctgcaagcctctcattctcaagccttttcagctggaggcctggctgcactctcccagcattgctttctatcagggcctctcctttcccactccctttctcatattctctctctctttctttctttctcttatttctttccttccttccttcctttctttatttctcttttttctttctttttctttcttctttctctttcttttttctctttctttcctttctttctttctcttccttccctccctccctccttccctcctctttctttctttcttttccttccttctctccctccctcccttctttctttctttctctcgtctctctctttctttcctttctttcgctttctccctcccttcctttttttattcctttcctccttccttgctttctttcttcttctctttctttctttctttccttccttccttccttctcactctttttctcttcctttctttcttttccttccttccttctttcttgctgtctttctcttccttccttcctttgttcttccttccttccctccctccctcctttgtttctctctttcctttctttctttctcccttccttcctttctttcttccttccctccctccttcctgtctttctatttctttctttctttttctttcccctttctctcttttctttcttctttttcttttttttctttcttcactgcctgagatcaagagaggcacctctaaagctacatacaaccccacaaagacagaccttggtgctgacactggaatttgtttgccacctgcagagaaaagtagataccactaaggaacaaacatcaacccatttgaaagtctctaggagctcagtgttagaattaaggcatagatctagttgggaatggggctggatgggggttggaatctcatgattctctgcacattctcttcaaccacctgggagagttggcaaatccacattcctgcttgggattctgactcaagtgtaactgtagtttgattcctcatgaaggacaggaaatgtcccagagagatttagagagatagggagggagatagagagggaacaggagatgatagggagggagcaggggatagagatagagagggagcaggggatgcctcaggattaggtttgagcaagagaagaaacaaaggaaaccttcagaccaagaaggtgaaataagcccaggaagatccaggaggaagaaggaacatgagagtagctccagaatggtgaacaaaacctgagttcttattcaacctgaaacacagg

SEQ ID NO: 42763 - DNA, 945 bp, Artificial sequence
  DNA replication origin
attggcagcgcggagcggagaacatggcagccgcggccgagcgacccccgctgattgggcagccgccgggtgcctggcaggtgaggcggcggctgccgggcggccgcgagtgggctccaccgggcttgagtggctgcggggaactggggccaggctccagccggcaaacggcgggacgccgccgggactctcgcgggctttcccccacccctcgcgggctctttgccccgcgaggatcggtcccactgctgcgccgatggaggagacgcggcgctcaacgtccagtcctgcttgggcccccgctgcctcaccaccttgagaacatgtcccctctgtagctgcagggcgcagatcctggggagagcgcagcagtttcgcgctcccggtccagccgctgcgtccacctccaatcactgcgagttctgatggcctcgaggccgggacccaggccgggatagttcgccgtttgtgcccccaacctgtcggcagctgtccgagacccaaaggagaagaaacgattacaattagagctgatctccgttacttccgtctgcgccaagcgttgaccctttagtttgtgagcagcggccgtactcgccgctgcccacttcccgaattacacaccgggcacgacacagcaaacatatacaacgcagtaaacccaagcacacagtaggaaacaagcacacaacacagtaaacacaagcgcaccacaggaaacaaacacgacatatgaaatacgcacacaacacaacaaagtaagcacatacaacacagtaacataaactacgcacaacacagcaaacacagaaacacaactaaacacaacagagcaaatacacataacagcgagcatacccacaaatacaaaacatgcaaagaacacttttagccagtgtacgcaaaacatgcacacaacacactaaacacataataaacacacta

SEQ ID NO: 42764 - DNA, 921 bp, Artificial sequence
  DNA replication origin
gtgccctgtgggcgacgggtgcccagcgccctgctcatgcagcccgggaaacagcaagtagctagggggctcggggatgccagctggagcatgcaggctgctcgccgagccggcgaagagcccgtgctgcccgccacccgaggccgcctcactgagcccggagctgcgctggcggaacagaaactcgcgcgttgagttgaaggcggcagaggcagcgccaccgtagctgggcacctggctggtgtggtgatgatggtgatggtggtggtgatggtggcccagggcgttggcgtagcccgaaccctgcggcgtgaaagccgagctctggcctgaagatagatcgtgcgccgcggcagggctcagcttgaaggcagcggcggcggcggcggcggcggcggcgtgggttgagtccccgaagggattcagccccatgcctgccggctcacggttgggcatctcgtggtggcgcggcgcgccgaagctgcccactcccagcccagggaactgcgggcctccgtccaggagcatcgtcatgggtgggacgttctgggcacaggcgatccggccgaagtgagagagggtaccggcgaaggaggagatctccgaagtgccgtagtcggaaaggggtggcggcggttggacactgcggggagacccccaaggcgctaccaggggctgcaactttccgtcactgcaagagtctcctgcagagggataggagggaggaggggaagaaagagcagggagggggtgttggcggggggaggaggagggaggagaagggaggagaaaagactcggactagatctggtttaacaaactaacaggcgcgcacaaagaaaaataagcaaaatagtaagtggagggcggagtttgccaatcctgtcccgggcacccctcctctccccgagtgcacagaac

SEQ ID NO: 42765 - DNA, 992 bp, Artificial sequence
  DNA replication origin
ccctttccctggccgccacctctctccctcgcgctctaagtccgctgcgtgacggggtatcgccagtggaacccacgcccgcctgcttttttcccttacctgtgtgggtcctcttgtggatcttgaggttctcagaacgggcaaagatcttcccgcagcccgggaaggggcatgggaagggcttctcgcccgtgtgcactcggatgtggttgaccagtttgtacttcgccttgaaagacttgccctcccgggggcactcctcccagtagcagacgtggttgttctgctccgggccccccacatgctccatggtgacatgtgtcaccagctcatgcatggtgctgaaggtccggtcgcagctcttcttgggccggctcagctgagcctcgtcgatccacttgcacgacagctcctgcttgataggctgccgcatataacggaagaaggcgccgggcccgtggtgggccgccacgttcactcccatgttcatgttcatggggctgtagttaggaaactgagcgccggccgcgtaggggtccgtgcgcgggctggccactgggcggtatgggtcagcacggccgaacagctccccacgcagccccaggtggacctggttgttgtccacgtgccctgtgggcgacgggtgcccagcgccctgctcatgcagcccgggaaacagcaagtagctagggggctcggggatgccagctggagcatgcaggctgctcgccgagccggcgaagagcccgtgctgcccgccacccgaggccgcctcactgagcccggagctgcgctggcggaacagaaactcgcgcgttgagttgaaggcggcagaggcagcgccaccgtagctgggcacctggctggtgtggtgatgatggtgatggtggtggtgatggtggcccagggcgttggcgtagcccgaaccctgcggcgtgaaagccgagctctggcctgaagatagatcgtgcgccgcggcagggctcagcttg

SEQ ID NO: 42766 - DNA, 1151 bp, Artificial sequence
  DNA replication origin
ggcagggaggcattcgtccacccgaaagccgcttgcggctcccggggctcatcagcgaacgtcctctctcgctcggcccctccagccttttcgcagcgcctgggatagagggggcggcgaggcctggggactggttgtcggcccgcgcgggtgcccaggggctggcgcaaaaggggccgcccccgtgccgggaacagactttgaagtgggtttttagcgcgcacgtgtgagagccgggccagggccggagcggggacccgctgggaggaaagaggaggctccggccggggccccaacccctcccccgcttccccgtggctccggccttttcaagccgcggccgggggcccgtaggcctcccacacccacccccactcccgcgccctgcccgcgccgcgcgcaggcgcacacttcgcagccgtcgagtcggattttgcagcgagggggttggggatagagttgaaagccgctttgcagtgccgcggcctcggtcgagctgggagggaggggaggggaggtatgtgggaaggggggctggttttggggcggctctcgagtcgtgaacatggcggccggatgcgaacccccgcggagcgcagcaaagcgcagcaaaggctgcagaactgttgcgtagtttaaactcccttgttattcctcagttctgggcgcctcgcgggggaatgtaggtcgtggcggttgagcgcaaaattgttaaaaaaacggaagcgaagaagttcttcctgggcattctcctgggaagttggcgtgtgctttttgggtttggggttcccatgggacttggacaaaaaacccgccagaggcctccccacccacctggcccgacctaaaacgccccctccgggagctgccatggctaggggatgccatttcgagttatcaggccccggtcgggattccacagaaccttgagtccctaaaaatgccccaagagcggacagtatgttctcttccaggacagtggcgaagcctatgaacacgtaagcaccattttccaagaaaatgccccggctgttagacaaatgtgccattgcgagttcgacccctacacgttgcccaggctccgttttctgtatatctcatttaaacgtgagcctatgaaaattggcactgtagctttggtgtgtgcctta

SEQ ID NO: 42767 - DNA, 856 bp, Artificial sequence
  DNA replication origin
accgccatcgtcatcatggcccgttctcaatgagctgttgggtacacctcccagacggggtggcggccaggcagaggtgctcctcacttcccagatggggccgctgggcagaggcgccccccacctcccgaacagggcggctggccgggcgggggctgccctccacctccctcctggatggggtggctggccaggtgggggctgcccccccacctcctggatggggcggctgctgggcggagacgctcctcacttcccagacggggcggctgccgggtggaggggctcctcacttcccagatgcggcagttgccgggtggaggggctcctcacttcccagacagggcagctgccaggcggaggggctcctcacttctcagacggggcggctgggcagagacgctcctcacctcccagatggggtggcggttgggcagagacgctcctcacctcccagacggggtggcggttaggcagagacactcctcagttcccagatggggtcacggctgggcagaggtgctccccacatctcagacgatgggcggccgggcagagacactcctcacttcctagacgggatggcggccgggaagaggcgctcctcacttcccagtctgggtggccgggcagaggggctcctcacatcccagatgatgggcggccaggcagagacgctcctcacttcccagacggggtggcggccgggcaaaggctgcaatctcggcactttgggaggccaaggcaggcggctgggaggtggtggaggttgtagcgcgccgagatcacgccactgcactccagcctgcaatcccaggcactcggcaggctgacgcaggagaatcaggcagggagg

SEQ ID NO: 42768 - DNA, 1576 bp, Artificial sequence
  DNA replication origin
gcagcaacagcgaagatgcgaggccattacctgtttgatccctgtcggaaacctggcacgggccaacttttcccgattatcacgccaagaagttgcaaggactagtcgaagactcggaggggccagggcgagggcgcgctcccccgcgcgctgcctcgtccctcctccgtccggccgcccgagctcccggcctctctcccgcccgcgctcactccctccgcccgcctccctcctctggcccccatcagaagggcaacagggcgagggggtccggcgaaattcggaccggagcagctggacatgcacggtgtccgccgggcgcaggggccgaccacacgcagtcgcgcagttcagcatccgcgtgccagtctcgcccgcgatcccgggcccggggctgtggcgtcgactccgacccaggcagccagcagcccgcgcgggagccggaccgccgccggaggagctcggacggcatgctgagccccctccttggctgaagcccgagtgcggagaagcccgggcaaacgcaggctaaggagaccaaagcggcgaagtcgcgagacagcggacaagcagcggaggagaaggaggaggaggcgaacccagagaggggcagcaaaagaagcggtggtggtgggcgtcgtggccatggcggcggctatcgccagctcgctcatccgtcagaagaggcaagcccgcgagcgcgagaaatccaacgcctgcaagtgtgtcagcagccccagcaaaggcaagaccagctgcgacaaaaacaagttaaatgtcttttcccgggtcaaactcttcggctccaagaagaggcgcagaagaagaccaggtcggaaagggcttttgctttcttttccccatactttacgagtgaggtgggggcggtggggagcaggtatgtagcataggtgagtttgttggtggcccatcttgtgcagaagaggccacctagcctgtgtgcgtgcgtgggaaggcgctggctttcttgcctccgtaacagtaacacgcttgctgcattgcaactgccctgggacaggcgcagagcctgggggcatactctgccctgggtggcttgccctcagcttcggacatgtcacatatgtgcatgcccggtgggctctgggcaggcgtgacccagacatggctgtgatatgtatggcgtggaaattgcaggcgcagagctgggcagacaccatcctcccgtccccaggagagcctggggaatccctctcttgcttttatctctgcctcagacccttcccctccagcttccacctccaagggatgtgggcttctgctgtctaggcattgcgtttctttgatgacttttaagctttttgggacagacttgacttgtggtgcagcttcgaaatgtttgctggggcggggggaggggggatttctagaaccttgttgcaaagagctgagagatttggttagacttagtgtaatcggttacatgctactaaaatgcggtgttgaagaggggatttaagctcatacccagactgtggtgcttttgaacattttcagtggtaggagtagcgcgatattccagcgactggaaattcag

SEQ ID NO: 42769 - DNA, 710 bp, Artificial sequence
  DNA replication origin
accgcttcttttgctgcccctctctgggttcgcctcctcctccttctcctccgctgcttgtccgctgtctcgcgacttcgccgctttggtctccttagcctgcgtttgcccgggcttctccgcactcgggcttcagccaaggagggggctcagcatgccgtccgagctcctccggcggcggtccggctcccgcgcgggctgctggctgcctgggtcggagtcgacgccacagccccgggcccgggatcgcgggcgagactggcacgcggatgctgaactgcgcgactgcgtgtggtcggcccctgcgcccggcggacaccgtgcatgtccagctgctccggtccgaatttcgccggaccccctcgccctgttgcccttctgatgggggccagaggagggaggcgggcggagggagtgagcgcgggcgggagagaggccgggagctcgggcggccggacggaggagggacgaggcagcgcgcgggggagcgcgccctcgccctggcccctccgagtcttcgactagtccttgcaacttcttggcgtgataatcgggaaaagttggcccgtgccaggtttccgacagggatcaaacaggtaatggcctcgcatcttcgctgttgctgctgctctgggcgcggcacagtcgcagcacaggaattcagccgccgcaggcaccctccggaacagcgcgacagcctccttgcagcc

SEQ ID NO: 42770 - DNA, 1177 bp, Artificial sequence
  DNA replication origin
gcttctgatggagcaagagacatttcaagattgcagagaagtggaaggaggggtagcaacagcttcccctgtgaagcaatggaatctacagaagggtccggtgattcagctcttatgggctaagaagcctgaaagcatttcagtgttgctgagtccgagcttgtttgttgggtagtcaggcaaggaaaaaagggctagagtctgaagataagctgagcatctggttttgcatctacattagttctgaaaagaggtgatgggggtgccatgtaggagtccagtaaagacggtgtagggctgccaggtagtagagctgctctattttgcttcctagttggcctcagaaatcaagtaaaatagtcaaataattgtgtctgtttgaaggtagggatgtagacaggccatttctctttgctgcatttctggcctcaaaacctcttctttcttttcctccagaataaaatataacacagggagaggacagaacttgttaatagactgaggccagcaaaaagccagactggttcctgaattggagggaaggaggctgcctgactttggaggagcagaaaaaaataagttaggagattagagatgggccacagcttaaatagagaggttcgactctgcatttcccaaatacgtaatgcttacggtacacgacccaagctctctgcttgaatcccaaatctgagcggacagatgagggggcgcagaggaaaaacaggttttggaccctacaaattggcttgaaatgaaaagtcagcaaaaaccactgggtggcagcgtggtgtgcgggcgcagctctgcagtgtctgcttctgctgctaccgctggggctgaacccgtctggggactctggcctcctcccctgaatggctacaagtgtcgccaagcaaaatacctctgcgcgggtgggtgagggttctccgggttgttggtgcgtccaagcctgaggcagggatctggcgaacttctgaggggctccagcccgagcacaatctggtcagctcaaacactgaggaaacacccccaccactccatcccccaatgccgagcaaacccccgctccgtcagcccaactacctcatctcagttcctcctccatcactgtttcctcccgaagctcctttcgggaaaaggaggggagaaggatttggacgactggggcagtgcg

SEQ ID NO: 42771 - DNA, 1326 bp, Artificial sequence
  DNA replication origin
caggaatctgccctgctgtcagaacccaagcttgaacccaccttcagccccctctccccgcccccaatgcaaacaaagagcctggtcgagacgcagaacccctcccccctcctttcccaccacctccttccccccccccgccacccgacacctcctaatcctaaactccttatccaccccaaccctccgggaaggcaggagtttgcacccttcgacacgccgcgtgcaaaggtgagcaaccctggtgccctggcgccgcccgcgctgcgctttggcagcgcagcctcgccaagccccaggagaacaaaggctgatgtccccttgtcactagtgcccagcgtgagtgggcctccgcgggagggggcagtcctcttcctctgtttgctggggttcagccaccgcgcccggggcacccgaccactggtccccctggagtgcgcgcctctgcccagggcctcccatcggcgggttggggaggcgcagcaaagcggtgctcaggctggggagaactaaggcaaaggcaggggacgcccccccaccctttgccggttctagccgttgcctttctcaggaccgggattagctccagaatgtaaactggagacagcagccttggagaccggggtgcggagaggcacagagagggaatatggaagagcagtggggaacagcaggtgccttaggtgcaagtgtccgaatggccacggagcagacgctggagtgggctggactagccctgagggccccaagcacactggaccgcagcgacccacgccgagtccccactgcagaagtgaggttgcagcgcagggagtcccagcttttgttcatgggggccccagttccttcctgagccctcaggcccccttcactcccactcctttctctattccttgttctcctctcctccttctcgcctctccccatctctcagagctttctttcccgggagattctagggcagcaccagccctcccccgcggaaagttgtcaaagtcttcagctcaaggcctttatccttgtttctaagtggagccatttctcccccaaataggcgaaagggtgactgaaggttccggaagtttgtggaggggttagatccgttgtcatacgggtcattgttgcccccggtctggctcaaggctagcattcaatcccaagtgaaagagtaactttggaaagtagaacgacagctgtaggtttccagagctcccctaattgttgagtctcaaacaggcatttatatgataaaggaaaatgacttcagggtcattaaatcgttttgttttccactgagggcccagagaagtaaatgtaattaaagaa

SEQ ID NO: 42772 - DNA, 963 bp, Artificial sequence
  DNA replication origin
actcacgctgggcactagtgacaaggggacatcagcctttgttctcctggggcttggcgaggctgcgctgccaaagcgcagcgcgggcggcgccagggcaccagggttgctcacctttgcacgcggcgtgtcgaagggtgcaaactcctgccttcccggagggttggggtggataaggagtttaggattaggaggtgtcgggtggcggggggggggaaggaggtggtgggaaaggaggggggaggggttctgcgtctcgaccaggctctttgtttgcattgggggcggggagagggggctgaaggtgggttcaagcttgggttctgacagcagggcagattcctgagtatgtcaccatgttgcacgcgcgcagcacacatatgcacactcgcgcacacgcacacacatgcactcatacagacaggcggccggctgtcagcagacagcgcggttcccggcgctccaggctgcagcagcttcgtctgcccgcagcgccaccaccgtgcgtccagaggggaagtggaggaggctggaggcactcgagggtcgacaattccgcgaggaaggagggaaagtggtgcaaacctagatccaccccctagcgacctctgcccccccttttctcccggggtcgcagaggtcatgggcagcttaggctccgggaaggaggcaaggagccgccggagggcggcgcgcacgcgagggggcgagggaaacgaaggaaaggaaagcaggcggactcggcgggcgggcttacccttagaagcatctttctcctctttgggcttggtcacctttccactcatagatcccagcttgcttgacaaggttcgctcagaagacggaagtcctcgccgagcgggtcggacttgggagagtgcttagggcggcaagtctcgaccacgagctcccctcggtgtggttcggggcggaatccgcttttccccaccgctgccgccgccg

SEQ ID NO: 42773 - DNA, 888 bp, Artificial sequence
  DNA replication origin
gatcccagagagcccttctctccccactgagagccggactgtctcaacttgagcagctagccagaagcgaaaagtcgtcgactcccggactgagattccactgctcggtgcgagcagttgccaacaggggagtccccaaagtgtaggtggcgaccagcacgggcctgggaaagcaggcgctaggagtagaggagttacaggggccggggtggggggagcgccggccttccatctccttggccaacggtgggagcccgctacagtggcacccgcgggccctccctgccccggaggggccagggtacgcccagcagacacgctcgcccgcactacgcggggctcgccggggttttgccaaccggcggctgacgtcggcgcgcccctgccgagctctccttttactacagcgggcaggcggctttgtgaggccccgccttcgccagcccccaccctccgcgtgcccacaccttgccgtttatatagaatgcgccgcggtgttgattcgtggctctctaggaccggagagttctttggaaggagagcgcgagcgagggagcgggcgagctccgagggggtgtgggtgtagggagagagagaaagagagcaggtaagggccatcgtctcccactcctccgccggcgagcaactccggccccctttttggcaaaataataggaacctggaaatggattaaatagaaagaaagaaaagaggcgaccctctcctccccattccccgcgggcgagaagctgcgcgactctgcggtgtaacaggctcacacgttgctcatcacatgttcaaacatttccctttcagggaggcttgttatttttaagtgaatatttttatctttgttttgattttttaaaaagccttcctcggggtttt

SEQ ID NO: 42774 - DNA, 1104 bp, Artificial sequence
  DNA replication origin
accgcagagtcgcgcagcttctcgcccgcggggaatggggaggagagggtcgcctcttttctttctttctatttaatccatttccaggttcctattattttgccaaaaagggggccggagttgctcgccggcggaggagtgggagacgatggcccttacctgctctctttctctctctccctacacccacaccccctcggagctcgcccgctccctcgctcgcgctctccttccaaagaactctccggtcctagagagccacgaatcaacaccgcggcgcattctatataaacggcaaggtgtgggcacgcggagggtgggggctggcgaaggcggggcctcacaaagccgcctgcccgctgtagtaaaaggagagctcggcaggggcgcgccgacgtcagccgccggttggcaaaaccccggcgagccccgcgtagtgcgggcgagcgtgtctgctgggcgtaccctggcccctccggggcagggagggcccgcgggtgccactgtagcgggctcccaccgttggccaaggagatggaaggccggcgctccccccaccccggcccctgtaactcctctactcctagcgcctgctttcccaggcccgtgctggtcgccacctacactttggggactcccctgttggcaactgctcgcaccgagcagtggaatctcagtccgggagtcgacgacttttcgcttctggctagctgctcaagttgagacagtccggctctcagtggggagagaagggctctctgggatctgggtgtcagtaggtcagagagtgaaactgaccgcggcggctgccacctcccacccccacccccacacgcaggcccctcctcctagggctggtcgctcttgttggtaaactggaagcaaagagtgcccaccgcccaggatggccaatcccaggcaaacgggtgaggtgggactgggggcgagtgctgaagaggaataagtaggattgaaacgttgcctgaggaatacttgtgacaaaacccagagaaggtccctgaagattagaactagaaggaaaactgctcaagaattgttctacagagggcagatgaggaaggaaagagagagagagagagagag

SEQ ID NO: 42775 - DNA, 894 bp, Artificial sequence
  DNA replication origin
tatcggcatgaaagtgcagccatctgggttctggggcaggcctgggatcctgccgcaggacactgaggtccacggcgccgaagcggcagcttggggcatgtgcctggccgcccgccttggcgaacccaggtagggccgggcccctgccgctgccatcctcacgctggagagccgggcagggccgctactccagccagcagctgcccagctctgacccgcgcgccgccgctgggcactcaggcactgccggaggggtacagcccctggccccgctcagcccagctgcgccgcggccgccagtcctccggagcccccctagtagggacagaggcgcagaggcccgagagctccgcgcgcgcggagtccaggaacttgttaagagtttggggctctggcggagcgctctggcccccgccgctgcgagggcaactctccctgggtgcgcacacccacgcccccgcttagccaccggtggatgaaaggaggcgggggctgtggaggagggacgcaaggagctaaaagagagaatttctgcagagattcccattttcgagggacgaaaggccaacctaggctagcacttgtggtgggaggagacagcccagcctcgcactctcatggcaactcatgcaagtcttggcggtttcttagcattctggccagtatccacctgggcaaagactcggcgcaagggagttacactgtgtgagcacatgcaggtggccctgtcagggctgctgtctttgcccgaagagaatactagccctgaatagtctgagaggtcctgtgctgaagccgaaatatgtcctccgaggatgcaaacaaacacacagacatactctgatctcagtctttggatatgccaagtcccacgcccttcaggtcccaaacgcc

SEQ ID NO: 42776 - DNA, 919 bp, Artificial sequence
  DNA replication origin
atgtgggagactgaggtgggagaatcgcttgcgcccaggacattgacactgcagtgagatgttatcatgcaaaaaaaaagaaaaagaaaaaagaaaaaaaacccaacaacttttgggtgcactcaccattgttccatctgtaagggtgcacccttctatacagaagtaccttgcaccgctgagaattaaaaagaaaattgtatattcgaatgctattcctttagcagcactgaaactttatatgtgacaatttgggggcccatctgggattacattcccctcctggggtggtctctggttctgcagtgcaccctgccctattgtggtggcctcaggggtgagaaatcaagacccacccagtgcgaggaataacccaagctctcagcaatgcgggggggggggggggggggggggggggggaactggccagcgacctagcttaaaggatcctcacatactgtggcaatgactctgtgcgcagaccaaggaaggataagccgcgggagccgtaaagtacttccttggtggtcaaattctggagggctaaatatgtgtatgcgtgaatgatcaccaacaaccctgcttacggtgttgtgtggatggtgacaagtcctactgcaggatggagtgagtgggtcctctccatggttccatagctacctcatatggcttagggcagatcctgccatgggatttataccagcacaccaacactaacaggggcctaattctcccttaggggagcagccagagaggacagcacgagtgggaagtgtgcaaaggaccttcagaggggaaaaggggggaaacaggtcaacctcccaggacaagcaaggcaaaatactccctggtttgaggggttgagccttctaggacaggcaagacaccccctggtttgaggggttgagccttgtgggac

SEQ ID NO: 42777 - DNA, 1074 bp, Artificial sequence
  DNA replication origin
tggctcccgacagagacaggggagtagtgtcgggctgaggcgaggtgaggcgcggggtgcctcgggagggttccccgtgccccgaggggggcggccgcggagtccagcggggaggcgggcggtggtgccgcgtcggggaagagcgcatcccgcggggtgccgagcccggcgctggcggagagacgggggcgccccctccccacaggaggagcctcgcgctcctccgccatccttcccccgcgcggcgggctcgccttctcagtgggtgctgcgcgagctgccggcccggggtgccggggccagataagggcgatccgcggggccgccgcccccgggtcaggcaggccgggggcgggccgcgagtgaggcggggcggcggctaggctgcgggcggctggggggcgggggagcgcggagagccgaggggggcaggcggcgagcgggtggcccggccgcccgcctcgctgctccgcttggcgccgccggcccacgccgcagtgtgttttgtggacggcgccttcccagacagcccggtagagcccagctcagcgcccggcagccttcgacgcgatgttccgccggagcttgaatcgttttgtaagtacactcgctgcggctccgcgcgtgccggtttgcttgctcgccagccccttcgccgggtccctcacaacaattttctgagggggcagttacgtctctgggagacaccaccacccctcttcttccttttcaccgaaacacggtgcccaggcggccggggaggggaggcaggtagggctctcggggtatcccaccctcgcccccaggacaattcgaccagggcttcccggagctgttacaaactctgcctgaaactgggggccgccttcgggctgggtggtgggggggactcgtggggggaccgacccggggacccctcagtttgccaattagtcgaagatggcgttttattctcagggaggttgctttcttttgtttcctctgccacgagcacatggaggtaaacctagacctgtcacggtggcccaaaagaagagctgggggctgagggagccggagactagggcaagactc

SEQ ID NO: 42778 - DNA, 1074 bp, Artificial sequence
  DNA replication origin
tcctcctccgccgccgccgctgctgcctactcttggtcctccacctcctcacctcctgctccgagctccccgcctccttctgcggccgccgcctccttcgcgtgcgccgccctgcgggcgggcgggcgcgcgggcggcggggccctgaggccaactgctacagcgctagtcgcccgcggccctggtgcacgccccgccccgcccgccggctcagccacccgcaacggcgtggatgctgccttcgcggccgcggagataaccccgcagccgccggcgccgccgcgatgcccccttccggccccacggtccgctcctacggcccccccatggcgccgcggcctcccagccgccgccgccgccgccgcctcggtcgccgccgccgctgcggccccgcagctcggtcccagcccccgcttgcgccgcggctgcagcaccgataactcggagcggggctggcaggagcgctgcctcaacgcggcgcctgcctacctcttagcccccttttcacacatttttgggacttgtcggcttcatccaatgagctgatcaaattttacatcctatgttgccagagaggattatggggcaacttcatggtgtcgatcacatccagggcgccgatccggggaggccgggggaataaaagtggaaagagcgcggccctcgtgggtaggcaggcagtctggaccctagcaatgtcctccccacactaggtgcccgagaaaagtgttttccgtggacgaaagtagtattttgtagaagaaaaaaaatcacagggaaagtgcctgcctcgtcttcttgggcctcagtttccccaagtgcccgttgaagttgttaaactaggtctccggaaagtgctccagtcctgattgagaactttcctgctgtccctgcaaagcactacttcggggttagtttcatacttatcaaattacaagagtaacggtcagaaatggtattgatccccccttcattcttgcaaaggtttttgtcattaagaaaaatggggtggagagtggattctgtgtggactactctcaactattgaaaatcccaagatgaaggagcaagggg

SEQ ID NO: 42779 - DNA, 1479 bp, Artificial sequence
  DNA replication origin
taggatgtaaaatttgatcagctcattggatgaagccgacaagtcccaaaaatgtgtgaaaagggggctaagaggtaggcaggcgccgcgttgaggcagcgctcctgccagccccgctccgagttatcggtgctgcagccgcggcgcaagcgggggctgggaccgagctgcggggccgcagcggcggcggcgaccgaggcggcggcggcggcggcggctgggaggccgcggcgccatgggggggccgtaggagcggaccgtggggccggaagggggcatcgcggcggcgccggcggctgcggggttatctccgcggccgcgaaggcagcatccacgccgttgcgggtggctgagccggcgggcggggcggggcgtgcaccagggccgcgggcgactagcgctgtagcagttggcctcagggccccgccgcccgcgcgcccgcccgcccgcagggcggcgcacgcgaaggaggcggcggccgcagaaggaggcggggagctcggagcaggaggtgaggaggtggaggaccaagagtaggcagcagcggcggcggcggaggaggaggcggtggtggaggtgcgcggcctgaagaggaggatggaggagcagcagaaggagggcgaggccgaggtcgcggagcactggttttccaagtgggagcgccagtgcctggctgaggccgagcaggaggagcagctgccccccgagctgcaggaggaggcggctgcagagttggcagggctcaagagcgagaagcagaagctgtggcacctcttccagatctcggccaccgccgttgctcagctttacaaggattctgggtgccaacagcaaggactttccatgtgggaccccttccagaatgcggccatggccgtgaccagcctctacaaagagagcggggatgcccaccaacgaagttttgacttgggtgtccaggttggccaccagcgtcgcatcaaagatgtgctggagtgggtgaaaaagggccggagcaccattcgtcgcgaagacttgattagcttcctgtgtggcaaagtgccccccgctcctcctccacctcgcactcctaggacacccccgaagccacccactggggtcaccagccaggctgtggcaactgagtccagctcatcggtggacgtcgacctgcagcccttccaggaggcgatcgccctgcatggcctcagtggtgctatggccggcatcagcatgcgatcgggcgactcgcctcaagacagcggtgtcgccagcagtgggcgccgaaaaactagcttcttggaggacgacttgaatcccttcgactcagaggaactggccctccacctggacagtggggggatccgcaagcgcacctcggcccaatgcagtgatggcatcacagactccccaatccaaaagcgcaaccgaatggtctaaactgcctcattggttgcctgccgccatattgcttgagagtgaactcaaccgtcgacatgc

SEQ ID NO: 42780 - DNA, 846 bp, Artificial sequence
  DNA replication origin
tgatcatgtcgcgcaggtcgccgaggcacgcgcgctgagagtgcgatgcgatggcgggcggcggcgagctgggctcagacttcactaccgagcccatggggcccaggctcatggcggctgcggccgcagctgcggccgcggcggtggcgggctgctgcccgtaggcggcggccgcggctgctgtggctgagggcgccatgcccccgtagcccgaggcggcggcggccgcggcagcgacgttcatgtagctctgagcgccgggcggcatcattgggctgtactgcaggccggccatgtcgtagcggtgcatcggcggcagcgcgggcggcggcggcgggctgctcatgctcgggggctgcgcgtagcccagctgctcctgcaccagcgagtacgcgccgttggcccagccgttcacgtgcgtgtacgtgtccaggcgctggcccacgcccaccggactgctggcggcagcggctgcggccgcggcagcggcggcggcggccgcggcaccgggaggcaggaggccgctgggcagggagtacttatctttcttgagcagcgtcttggtcttgcggcgcggtcggtacttgtagtccggatactccttcatgtgcacggcgcgaagtcgcttggcctcgtcgatgaatggtcgcttctcggcgtcggtcagcagtttccagtcggcgcccaagcgcttgctgatctcagaattgtgcatcttggggttctccagggccattttgcgccgctgcccgcgggaccataccatgaaggcgttcatgggccgtttcacacggtcctggtctgtacccccgccacctccgctcgcaccaccgctgctgccgccgc

SEQ ID NO: 42781 - DNA, 1020 bp, Artificial sequence
  DNA replication origin
ccggcgggaagggtaggcttatcaaaatgctccgcgccaaatcagcaggaacccgcgggcttctcgcacctgatgagttctctcgaacaggtcgcattcacagtctgcctgggctctagctgggccccttatatacctgctcggattccccggggttggggcttggtccgcccctcgcaacccggaggacccgtgattgacaggttcgcagtgatgcgccctggccaatcattaccgagcccccgttcggcctggctggaaaaaaaaaagttcggggagccctttcgttcaccccacgcccctctttggcctagtgacgtggtaagagttacttaggaggcgggagtccacgaggcccactcagaggccaccaattagggtttcaaaaagtttgaaagaacgaaacctgaggaggtgacggggggaggggggagggggcacgcaagcagattggggggagggggcagaggggcgccttcggaatttagaaaacaactttgcaaccctgtcaaggcagaccggcgccccatcccccggccagcccgcaaagcttcccgttgtctgcacggaggttttctggccgcttctgctgccagcgctaggaacgcagggcaccaccagctacccaggccggcttagggactccaggctcattggaagtgctcctggctgcgtctccaagaagctctccctggaattggccgctggttgtccagatctttctctaggagggccagtgcgtccaggacgcagcgtgggtcaggggcccgggcatgggagacaggcttcaggactgcggggtgcattcggctgtgaggctcttgggggtttgcaggagggcgggcaagcagtcagtcgcccgtctcctgagcctgtcggaggcgctcgcacaaggtggtgtggaaagtatgtgtgggacgtagggggtgaactggcctccgctctctcgatcctggcccccgcttagcggcccctttttgtctctgctctgtggccatttcggtttttccagtccgatgc

SEQ ID NO: 42782 - DNA, 928 bp, Artificial sequence
  DNA replication origin
tgccagggctttaagaaatgcgttggtgaagggagcatcagaaccctgacaaagccctgaggtagctgtccccagcagcctggagatgacagcggggaatactaggattggttgtattccctgatttccacgggaataatggtagtcagagtgacagtggtagaggccagtgatagcacttaaccattaaaagacaatcatttctttttttagtgcttgatatttattgaaaataatgccaatgctttttccaggtagtattgaggagctgggctgagtgcttgtttgttttgtttttaagtactatttgtccaaatgcacacatctgtgggactgctgcaattttgaaagaaaaatgacagctgtgtaaaaccagtgcataggaaaaaagaagtgtcaacaatttggctgccaggcacaccgcgcccctgcagcaatctggtggggcaggggaggacactcggagtaggtagaaaactaaccaggctgaacggccccttcaggggttggtgagctgtccaaatcaatgtctgaaaaggcatagccaactctggcattttccaggttggtcctgatctcgaaaggtggtagtctgtaggtgggatgtggtgagtggatgtgaagtggcagcatagttctctgggaagatgtaagcctggcagcagggcaggtggcagcagcagggctacgggtggtctgcgcagtttgtaacaggggcctggccaatagctggggttcaggacacagttcagattagcaggggagggatcccggggatggccagggtagatgacacttccaagcacttccgagtgagtgaggctccagccccgaccccagcagcaggtaactggagcgctattcctggaacaaagacaagcactacggagaaatgaagagagagagcagacgggcgcgggtaggtaag

SEQ ID NO: 42783 - DNA, 1090 bp, Artificial sequence
  DNA replication origin
gatgtgattctccctctcttgcaccttgcaggtctcagggatgggaggggcttattcggaggtgaaagactcagttgcacagaggcaggaaggccaggcggtttccaggagtccaggcacagcctctcgggaaggcaggaagggaacacccatgactggtagtgcccctcccctgtccctgtgcctgctgccagctctggaggaccctatcagggtccccaggtttacaactttctgacttgcattttgggagtcagccggaggggaagttttctctgaggagggcagtttcagttaagcagagggaggaaccccaggactggccactcaacgagaagagaactctgtggaaggacagtgaccttccaacatggaggagaggcacaggctacaccctttcccttcctgccgtcagccctggaaaaaggttgtggggggagaaagcggggaggtgggcagggaaatatggacgagggctttgaagtgaggaggaaaaggtggagggataccgagaggtgggcaggaaggggtggaaagggtcggggaggtaggcaggaaggggtggagggggcccaggagatgggcaggaaggggtggagaagggccgggaggtggtcaggaaagtgtgggaaagaggtagagaggtgaggggtggttcctccatagagaggagacctagccccactgggagtctgaagtatttgaggcattttgtgagaaggcttaattgagatcagcagacagaagactcttagaactggccgatcctcaaggtaagggccctaagggagaactgagggacctcccaccacagaaagaagaagctcttgcctgccctctacctgctgtgagattgtaggtcgcagacaggaagagggtaaccgagggctgagggacacgtcttcatgacagaagaagggaggaggtgccagctctctagggaataaataggaagactttgagaaggacaaggggaaacgccacctcagaggacagactcccagagattcccagcatgctcctccatatcagccctcgtagagctccccagtcagctcaggctgagcggcagccctctcattgctgggtg

SEQ ID NO: 42784 - DNA, 1029 bp, Artificial sequence
  DNA replication origin
cttcccacctcatttcagacacggggcagcttcagttaagcagagaaaggagccccggggctggccaacaagcaagaagggaactctgtggaaggatagctatctcccaacacggagggaaggcccaggcgtcgcccagccactccttgctgtcacccctggacaaaacagatggagaggtgaaaacggagaggtgggcagggagaggtgggcgaagggcagggaagtggacaggaacaggtgggagtggggaggtaggcaagaaggggtgggagggggcaggttggtaggcccgaaggggtgggaggaagttgggaggtgggtaggaaaaggtgggagggagtgggaaagtgggcaggaaggagtgggagtggtgggaatatgggcaataaaaggtgaaagggggcagtaggtgaacaggaaagggtgggaaggggcggggaggtgggcattaaggagaggaaggggtcagggaggagggtgggagggggtagggaggtgggcacaaaggggtcggggggcgctgaggagggcaggaagaagtggagtgcggggaagtggtcaggaaaaggtggaaggaggcggagaggtggggggtggtttttccatggagaggaggccccaccccacgctgcctctgctgtcagccctggtcagccttggcagggttcgcggatgtgctttcccgacttgcactgtgggagtctgaaggacctgaagcattttgcgaggagtctggactcaggtcagcagagggaagcgtcttagacctggccaatcctcaaggtaagggccctaagggagaactgagggacttcgcaccaaggacagaagaagccccggtctgccctgcgctgccataggacttgcaggccacagacaggaagatggccgccgagggctgaccgaggcgtccccacaacagaagaagggaggaggtgccagccctctagggaataaataggaagacattgaggaggactgggggaacccccacctcagaggacagcttcccagagattcccaccc

SEQ ID NO: 42785 - DNA, 1351 bp, Artificial sequence
  DNA replication origin
ctgcttgtgaggcaaaatgttaacgtttagactgaaacacaagggtgcatgttcctgaccaattggccagtaggcagagataagagtttgtgccacaaaggaagaagacactgggggtggacagacaaaagttgtagcttatggtggcaagtcatgagaagatgggggttgaattctgcacaaaccctttgttttaacttttatgcttttccaagttgaatagctgccagcaagggtaggccctgtgagggcatgacagaaaatgctggtgggggaggagttgaaggctgtttggttttggagagagagagataaatgggtttttgtaactaatagtcattgcggtcctgatatggcagaaggatataggttgcagttgagggaattgtttgtgcattttttccagggagcgctgttgagttggatacatgaagagcggctctggcagagaggggaggggttggtaagaggtgttttatgggatccagcttgtatcgtgttcagttaagaggctggctatgaggcgaaggagggtgacagccctgtgtgtgacagtgtgggtggatctgatagactggggagaaaggtgtttagctgagcaagattataaacaggttttgagaatgaattggccaagtaggtgagatgcaggtttattttggactgggtttacgtggccagtttgaaaggaagggctgtgaactgctggatttgtgtggacaaacaaatttaacagttggaagaaagacgggagggagtgtgactgatttaagaggcaatgtgttaggctgatgaagggggctcaactgttagaggttgggggtggggacttagaatattccacagacaaaaagggcaaaaggagaaaaaggagatttgagtaggagtgaaattttggaaggcgccctgcagtcatacctcctgcattactgtgggaaattggcatgggctatccagggacatggggaagggacaccaggaaagatctgaaataaagtaggagataaaagattggaaattggagatggagactgttatgcactagggcattctggattggcaacttctggaattcttgttaagtgcagtgaggttggtcctgtgagggagagagagtaatttgggggtgaggaaatttctagatgtggatctggtgctctttttagtttggaatggtgtattcagtgtgggaaggatgttagctttgccactgtgtgagtagttaggataacctgctgaggacccgtccacttaggttggagaggggaggaggaggagtctgcgattcagacccagtcccctggttgtagggacagggaggagtgttttgaggatggacttttgggctggg

SEQ ID NO: 42786 - DNA, 1006 bp, Artificial sequence
  DNA replication origin
gaaggcatgatatcatatggcctggtttctgcctgtctacagaagttgcctgataattccgattgaggtcagttctggggacagctagggtccctactgggttatgagcagcatcttgttggtggagggtgttctcatggacctgggcacccgtaaatatgtgttccctgtcctccagggtgagggtagaggagaggatgacatatatgtcatgccaggtaaggtcataagatttagggaagtacagacattccttgaggaaggaggtaggatccattgaaaaggagcaaagtctcttttcagtatgggagaagtcagctagggaacttgaattcagattatgccttcagtccttgcaacctcctgcaagggaaagactttggaaggcctttgggcatgtgtctggttttcggcaaaagagcgttgggcgtgagacctggtttgaggtggagaaggaagggggatggagggtgacagtaagggggtggaggagccggatccgaaggagaaggtggagggaatgggagagggcaggagccagacgaaggggtttgttggccaggttgaaattcagaggaggaaggcttgtcccgaggaggaggcattttggggggtttctccttgaggaggaagatttgaaaaggtgaacaagattggcaggagagtgagtgaggcatgagcggagataagcaaagcacttcagatcatttaccattgtgttggagaaagatttttagatgatgttgaatttgaaagttgaatgttttgttttttagaagaggggagtgaatactctggatgggagtgaatactctggggaaagtgagtaccccagaagggagtgaataccccagaggggagtgagttctccagagggaagtgaataccccagaggaaagtgagtactggattccacctgggagaagggacctggagagttgggacagccccatagctattcatgctccccagaggacggagcggccagaatggcaagtgttctgag

SEQ ID NO: 42787 - DNA, 916 bp, Artificial sequence
  DNA replication origin
tctcacgaccagccaggactgaacaaacctagcccgaccaaaaacaaatcctgcatccaccggagtgcagcgcctggcactccgcgactgggaggagagaagcggcctgaggggggcagaacactgatgggcttcagggcggtgggccgaggtggctccccgagagctccctcgggaaaccccgctggcccgcctaaggctcggatggaggtggaagaggttcgcggagagacccggccattgccgcccgggtgcgctacctcgggcgggcggcgaggaggctggaggggctgctagcgcgtaccgcaatgttttgccgcatccctgttcccggagccggccgctcagccccctccgcgtcaggggcccaagcagcagcctggcggtccgtgtagcggaggcggggtaccgcgcgggatgtcgcgggggccttcagtcccgccgctcacacatttctccgcgcgctcccgtcccacaaggggcagctgccggagtttcagtggacctctctagacccaggcgtgcggtgggtgaggaggaagagaggccagatcaggccgcctcgaagacgttggcactagggagtcactgacctgcttgccacgggcagagtgaccctgtggttttgtggctgcgagcggcggcccaggctcccccttgcctgttctccctccctggccagctacaaaaatcctgctctcaccatgccagaaatcagctcaacatttaggccccttgcaaagtcgcgctggcagcgctcgcctggctttgcagagcttttagagttacccaccggctcttcctctggtattcctagtcttgccgagcgctagcaatctccgaccaacccgcgggccactgccccgagcctcagatccacgtctgcggaaagtggctgcgagtggggtgcaaaaat

SEQ ID NO: 42788 - DNA, 2322 bp, Artificial sequence
  DNA replication origin
ctttggccactcaaccggccccaaaccaacaggacccaaactaaaaataataagctacctgccccctcggctcgcgtgcgcgcgcgcgagatctctctctctctctctgtctctctctcacacacacacacgcacgcacacgcgctactgagctgagcggggaagaggcagcacgcgtgtcggtgcagcttgtgcagcccccgctgaaaattcacccacctctagagcccagcgtctggtgcagggcccgcggcgccgtgacctgcgctgctgtttccacgatggtatctatgtgattccggacagagctcctccgcgcccgctcgcccgtcaaacccacggagcagccccagcaggcgagcaggcgggccggcgggcaggcgggcagcggcgcgcgcgcgcacccgagcagacaccgcgcgcgcacccagcgcctagcacacgggctgcacctttacatacacgcgctgaatccccgcccccgctctccaccacccccccccaccccgcacacaagcagtccttcctcccgacactcgaccactttgaccccctcacattcctgagctcctacccccgtcccccatccagacatgcccatttgattcctcttctacccacacacccagaaagacagcgcgctttcctcccggcatccgccccctctttttgcctaaaacattccctagggaggagcgacccctttcctcaggcgtggagaccccagtcctctaacaagggcgcactcgcctccatcccccccaccacatacacacacactcgagcccttttcttctcttccagtcccctaataacgaaggaacacacacacacacacacacacacacacacacacacacacacacacacggggcattcctttgagagagcaaccaagaagccaggaaaagccaaagaaacactggagagcctgggggaggggggccgagggagatcgatagggtcgtcgagtctacgcggaattgaataattacaggatggaggggaatgagtcaacaacaatgacattcaaatgcaacaatcatacttggattttgtatcacgggtacggtacctttggctaattgtcaccccgcagaacggagggctcctggaatacttctccgtggcggtcgatcctggaaggagccttcttgggaaccaatttcctaggatccagtagtattcgcactccccctacctgtctgcgcgtaaggggccaggggctttaaggcgaaagtgtgaggctttagcctaaagtgagactatttagccgggttagaaggagacgggttaattatccgcaccttagaactccgtgggcctttggtgcagaatgggttaagccggatgatcttggagctgggggtggggataggggataggggataggggttgaggaaagagaggcgtgggactgggagagatgccgcacttgcgaccaaaagaaaaaaaaaaaaaaaaactactttggctactgagcatgcccagttcccagctcaagccctataagggaggcattgtgtgcattccacttctccgggctttggtggtgaccgggaggggagtttgactggggaagggggtggtagttgggagacattagggaaagggggttggagaacaaggtttgaagctttgggactgctcaggagggactgtgaagagagaaagggaagggacccacggagtaccttcgggagacggggagaaggagaggaaatggactaagaaaagtcacttcagtcgcccctcattgtgtataccaaagaggctttagcagctgaatctgaaatatccagtggctgcaaatccaacgtgtggattgtctaggccccttcttctaccctttttgttagtgcttccacaagagataagaaatattctgaggaagggccaatgttcaaaccagtttcatgcaaattgataatttcgttaataagcttgttaagaaaataaataaacctgggggaggggagcagagaggagttggctatcatgtatgtatttcagatacctggctttcctaaacaaaaggcataaacattggatgtgctcccatcccccaaccttgctgttttttgtaggagcttggctaagaaaaacaactctctctctcttcgtgtctgtgggaataaactagctttaggtaagtagagctaagttataaatgggaagtatttccctaggactcttggtagcctattatttgccacattcaggtaatactgccaggcccatttcttcaggaccagtgtgttgcccaatttacttattcaaatcccagcggctctagccacaatagagcacaaccggtatcca

SEQ ID NO: 42789 - DNA, 1156 bp, Artificial sequence
  DNA replication origin
tcttagtacagaacaaaatgaaaggtctcccatgtctacctctttctacacagacacggcaaccatccgatttctcaatcttttccccacctttcccccctttctattccacaaaaccgccattgtcatcatggccctttctcaatgagctgttgggtacacctcccagatggggtggtagccgggcagaggggctcctcacttcccagtaggggcggccgggcagaggcgcccctcacctcccggacggggcggctggccgggtggggggctgaaccccccacctccctccctgacggggcggctggcctggcgggggctgaccccccacctccctccccgacgcggtggctgccgggcggagacgctcctcacttcccagacggggtggctgctgggcggagggtctcctcacttctcagacggggtggccgggcagagacgctcctcacctcccagacagggtcgcggccgggcagaggcgctcctcacatcccagactgggcggcggggcagaggcgctccccacatctcagatgatgggcggccgggcagagacgctcctcacttcctagatgggatggcggcagggaagaggtgctcctcacttcctagatgggatggcggccgggcagagatgctcctcgctttccagactgggcagccaggcagaggggctcctcacatcccagacgatgggcggccaggcagagacgctcctcacttcccagacggggtggtggccgggcagaggctgcaatctcggcactttgggaggccaaggcaggcggctgggaggtggaggttgtagcgagctgagatcacgccactgcactccagcctgggcaccattgagcactgagtgaaccagactccgtctgcaatcccggcacctcgggaggccaaggctggcggatcactcgcggttaggagctggagaccagcccggccaacacagcgaaaccccgtctccaccaaaaaaatacgaaaacctgtcaggcgtggtggcgtgcgcctgcaatcgcaggcactcggcagactgaggcaggagaatcaggcagggaggttgcagtgagccgagatggcagcagtacagtccagctttggctcggcatcagagggagactgtggaaagagagggagagggagaccgtgg

SEQ ID NO: 42790 - DNA, 959 bp, Artificial sequence
  DNA replication origin
cccagtctggaaagcgaggagcatctctgcccggccgccatcccatctaggaagtgaggagcacctcttccctgccgccatcccatctaggaagtgaggagcgtctctgcccggccgcccatcatctgagatgtggggagcgcctctgccccgccgcccagtctgggatgtgaggagcgcctctgcccggccgcgaccctgtctgggaggtgaggagcgtctctgcccggccaccccgtctgagaagtgaggagaccctccgcccagcagccaccccgtctgggaagtgaggagcgtctccgcccggcagccaccgcgtcggggagggaggtggggggtcagcccccgccaggccagccgccccgtcagggagggaggtggggggttcagccccccacccggccagccgccccgtccgggaggtgaggggcgcctctgcccggccgcccctactgggaagtgaggagcccctctgcccggctaccaccccatctgggaggtgtacccaacagctcattgagaaagggccatgatgacaatggcggttttgtggaatagaaaggggggaaaggtggggaaaagattgagaaatcggatggttgccgtgtctgtgtagaaagaggtagacatgggagacctttcattttgttctgtactaagaaaaattcttctgccttgggatcctgttgatctgtgaccttacccccaaccctgtgctctctgaaacatgtgctgtgtccactcagggttaaatggattaagggcggtgcaagatgtgctttgttaaacagatgcttgaaggcagcatgctcgttcagagtcatcaccactccctaatctcaagtacccagggacacaaacactgcggaaggccacagggtcctctgcctaggaaaaccagagacctttgttcacttgtttatctgctgaccttccctccactattgtcctatgaccct

SEQ ID NO: 42791 - DNA, 1568 bp, Artificial sequence
  DNA replication origin
gccctccgcggatggcgcccagcctccccacgctggtgcccctcgcaaggagaggtggccgggaaaggcaacggactgaggaaagccggctcactggccgcgtcgccaccgcgtccctgagtgctcagaacttaccgagcgagcgcgccgcccagatcttttcccggaggcgcccgcagcatctgcgactcggggaggcaaaggagccggcaccgcctcggactggcgcagcccaggagcgagagcaccgcggggagcgcgggcggcgcccccagggcaggcagatccccaccgagcagctagccaacgggcaacgcttcttgcaggaaggagggagggaggcgagagggaggagggaagtaaagcgggagggaggagaggggaagaagggagggaggagggaggagggagggaggagggaggagggagtgaggagggaggagggagggaggagggagggagggatcgcgtcccccctctccctcacttatcaatcaccccacagatcaaatatccgggctgtgcacccaggacggggatgtaagagcccacaaaggagccgctgctccatttctctgacaagcgctgcggagcactgctcacgcctctcggtccctcttgcctggaactctgcccagcccttgcggcttccaccctgggctgcagctcgggctcggtcaagtgaaataagaatggcacacggtcggtaccatgtccaaggggagactaagactactgggtggaagttaacgacaagtgaaagagcagtcagccatccgagctggacaccctccgggacagctgcctcccctaactagtaagcgcccagtctttgggagttcgcaggcagatatttaagaacctcctacgaggatcgtaaacaaggactttcaacataagatagagctgaacttgagttgtgcaagtgtgttaacaaagcaagcccttagcagcgttccagtgcccattttgattccctttattcttcacgacgacgttgcctggatcttctagagcgtgatttttgccatcctcccttcccttttctcctttcttcttcctcttattagtagtccaggtggttgtgattctattaaaggaaggcgctctgtgaaaagagtcagtgtagttcaagagggaggtgcggtttttgccaagagcattgcgtttcccctcaagacttgctttctctagggcctctcctctactcttccagagtattcgagataaagttgcagtttgataaatttatgccaggagtagggagttcatttgatgacactaagtcattttcccctccatcctgtaggagaacgtcattaattcaagtcgttgccaccccctatccttttcatgcccgctagagtctgcaaaaccccaaatccttcttactgtcgaaaagcgtgatggtggagagcagacggggaggcgaggagagaggtgcaaaattagacgcaaaattacctctccagctagtggatctgcattggaatttgtctgtttccatatttcccatgcctttcaactcgttctcacagcactgacaaccacctttttcttgtccttcc

SEQ ID NO: 42792 - DNA, 1407 bp, Artificial sequence
  DNA replication origin
aggaagtaagtcacaagtgcaattccatggattttcctccagctgaatctccatgatccctccaatatgttcaaggacgccagcaaaaggcattacttttagcctattccccctgaggtctaagtgggtcagcaggacaaagcggaacacattgctgggcagtgaaagcagaaggttgtcattcaggatgagcactttgagcttgttaagtttgctgaatgccccagcctcgatggcactgatgtaattgtagtcggcctggagatactccaggctctccaggcctaggaaggtgtcctccctcaatatctcaagcttgttgttgttgagatgcagtcttttgagagttttcaggccactgaatgcccccgttcggatctcctgtaacccgttgttacctaggtgaagagtcaccgcgttggagtaattgacaaattcgtttggatacagtcttgtcaagaggtttccattgagaaaaagctgatagattcgatactgggggggctggagcaggctaactgttgtaaatcctttgttctcacagttgatattcagtacgttttccttttcttcgcacagacagcggatcttgcaaatgtctttggcagttttgcgactctctgtctgtaagatcccggccacggttaacacactgaggaaccaaacgccgctcagcatctttaggcaccttcggtgtcaactcaggtacctacaggcaaaccttaggtgggggcagggggaagaagcgggtgcagggaagaaagaaacaaggaagcccgattaaaaatggtaaagcaaggaggcggagtgggagcgagggagaatgagggggttagcaacacggcagaatgaaatcattgcattttccaaagcggtttcttttctccgctccctattcccccatcccgaggccacccacacacgcgccccgggaacacacatgcttgcacctgatttcccggggggtcgcagccagccgccaagtcattagtaaccgagttgtcctactaaatcctgcccatctcctcctcccctggggtatctcgaagagatctcgggcagctcgcccgtcttgagctcccagcagaaatcgcaatcgctttaggaaaaaaaaaaaaagcgcaaaaagggggtgggaaaatcaggaatcagggggctggcggcaggtgtagaggagagatagagatgggaaagacagtgcgaggtgggggttactcacacatcaggagaagactgaatccctctcctctgcagtccaccaggagtttagcatcttcaggaagtgggagaacaaggtaaaataagacgctgcttccaggggggatgccctgctttttgttggttgatttaatttgactgggggtgcgcagaaattaaaaatccgacaggaggcaggagcggaagaga

SEQ ID NO: 42793 - DNA, 1708 bp, Artificial sequence
  DNA replication origin
ccaagtaccttgtagaaagcgccattggagccccgcacttccaccaccagctcctccatcttctcttcagccctgctagcgccgggagcccgcccccgagaggtgggctgcgggcgctcgaggcccagccgccgccgccgccgccgccgccgccgcctccgccgccgccgccgccgccgccgccgccgcgctgccgcacgccccctggcagcggcgcctccgtcaccgccgccgcccgcgctcgccgtcggcccgccgcccgctcagaggcggccctccaccggaagtgaaaccgaaacggagctgagcgcctgactgaggccgaacccccggcccgctgcgggtgtaaacactgaaaccacgtcacgtgatcaacgctgttccctccccccgcgggctcagcccctcggccccgccctctctcttcaagtggcctgggagcgcgcgcatgcgcgctgctgggaaccggccggggtgccgggtcgaaagacagacgcgcgggccgggcgtgcgcgggcttggtggagggcgggaaggctgaagggcggtgacaggtcgcactgcctcgcgagggccagaacgcccatttctgcagaggtgcactcagtggcgtgggaaatcaaatgcatccggttatcccagttcggcctctctgggattccgcgggagggggtgtctggtctggtttggtttggtttggtttggtttggtttggtccggttcaaagtagcgcagtctgactgagcgggaggtggagtggaaggcgagaataggggtgaaggattagacagaagaagactttgaactaggaacagtggcaaccagggtgacccaggcttttgtgacccgtagaggcagaaggtgaggcgtctacgccctctctcaccagattttgggcggccctgtggagacaccctgtgccctttaagggacatggattgagtcgggatctcaaaatgtgagcctttcctcagacccagctttgacccacgtactcgcctttcctcaactcattttcatactttcacttgactatatattttttaaaaattgtgttaagcacttgaggttcatttctgcccctactgtatgtgcaccctgtgccagagggtggggtgaacacgtgtgtagcagtcatgcgtcctgtccacaggggccgatgcacctccttgcaaccctttacattccactgtgaaacaaacctcaactttttcttattcctgtttttacaccgtgcttatagctgccttaatccatgttcccttcgggatgctggtatccaactgagaagttgacggagcatctatcgtgtgccagacactgtgctaagtgctaacgagaaatcggtgagcaaaacagaaaagaaaaaaaaagaagaaacgactgccagcattgaacttagtacctagcaaagtaggtggacataaatcaaattgtcagacaagtaaatgagtagttgcagctgtgataaggggtatgaagaataggcgcttccatgatggcggaacatgacctagtctggggtggagaaggggagatgattccagctggaatatggcaggtgagagttaactaatagcactgagttggcagaggcaggatgacctgccccaggcaggtgccccagaatgagaggatgttgctgctggtggaactccagctttaaagcggtggatctagggccacattcctcaaggccatagcaaac

SEQ ID NO: 42794 - DNA, 1032 bp, Artificial sequence
  DNA replication origin
gagggccgcctctgagcgggcggcgggccgacggcgagcgcgggcggcggcggtgacggaggcgccgctgccagggggcgtgcggcagcgcggcggcggcggcggcggcggcggcggcggaggcggcggcggcggcggcggcggcggcggctgggcctcgagcgcccgcagcccacctctcgggggcgggctcccggcgctagcagggctgaagagaagatggaggagctggtggtggaagtgcggggctccaatggcgctttctacaaggtacttggctctagggcaggccccatcttcgcccttccttccctcccttttcttcttggtgtcggcgggaggcaggcccggggccctcttcccgagcaccgcgcctgggtgccagggcacgctcggcgggatgttgttgggagggaaggactggacttggggcctgttggaagcccctctccgactccgagaggccctagcgcctatcgaaatgagagaccagcgaggagagggttctctttcggcgccgagccccgccggggtgagctggggatgggcgagggccggcggcaggtactagagccgggcgggaagggccgaaatcggcgctaagtgacggcgatggcttattccccctttcctaaacatcatctcccagcgggatccgggcctgtcgtgtgggtagttgtggaggagcggggggcgcttcagccgggccgcctcctgcagcgccaagagggcttcaggtctcctttggcttctcttttccggtctagcattgggacttcggagagctccactgttctgggcgagggctgtgaagaaagagtagtaagaagcggtagtcggcaccaaatcacaatggcaactgatttttagtggcttctctttgtggatttcggaggagattttagatccaaaagtttcaggaagaccctaacatggcccagcagtgcattgaagaagttgatcatcgtgaatattcgcgtccccctttttgttaaacggggtaaattcaggaatgcacatgcttcagcgtct

SEQ ID NO: 42795 - DNA, 1902 bp, Artificial sequence
  DNA replication origin
caaccaccccgtctgagaagtgaggagcccctccgcccggcagctgccccgtctgagaagtgaggagcctctccgcccggcagccaccccatctgggaagtgaggagcgtctccgcccggcagccaccccgtccgggagggaggtggggggggtcagccccccgcccggccagctgccccgtccgggagggaggtgggggggtcagcactccgcccggccagccgccccgtctgggaggtgaggggtgcctctgcccggcggcccctactgggaagtgaggagcccctctgcccagccagccgccccgtccgggagggaggtggggggtcagccccctgcccggccagccgccccctctgggagggaggtggggggggtcagcccccctgcccggccagccgccccgtccgggaggtgaggggcgcctctgcccagccacccctactgggaagtgaggagcccctctgcccggccaccaccccgtctgggaggtgtgcccaacagctcattgagaacgggacgggatgacaatggcagctttgtggagtagaaaggcgggaaaggtggggaagggattgagaagtcagatagttgccgtgtctgtgtggaaggaagtagacatgggagacttttcattttgttctgcactgggagaaattcctctgccttgggatcctgttgatctgtgaccttgcccccaaccctgtgctctctgaaacatgtgctgtgtccactcagggttaaatggattaagggcggtgcaagatgtgctttgttaaacagatgcttgaaggcagcatgctcgttaagagtcatcaccaatccctaatctcaagtaatcagggacacaaacactgctgaaggccgcagggtcctctgcctaggaaaaccagagacctttgttcacttgtttatctgctgaccttccctccactattgtcccatgaccctgccaaatccccctctgtgagaaacacccaagaattatcaataaaaaaataaattaaaaaaaaaaaaaaaaagaaggaaggcctttgtgatgataagtgaaggaaggaagttttttgggaaaggaggtgagaaagttagggttttgtgaggggacttgagggaaggaggcctttgagcagggaaggaagtcaattgtgaaggtaaagaaagcaggaaaggtaaccatgaaagaagattaggtctttgtgaggggaggtgaaagaggttagaattttgttaggggagagcatggaaagaagattttggtagaggagaagatggagggtatacctttgtgaggagagataagggaggttggaactatataagcaaaggtgaggcagggaatgtactggtgagataagaaaggactatgaagaggagatgaaggaggttattatttcatgagggaggtgaaagaagaaaggcccttgtgagaggagatgagggagaaaggtctttgtgaaggaagacaaggaattttagtgaagagttgaggaattaaaggcctccacgactgaggtgagaaaagtaagcactttttcagaagtgtggtaggaagcctttagagagagataaaagaaagcatttgtgagtgaacatgcgggagggtaggactctgtgatggaaggtgagtaaagaaaggctttcatgaggggaaatgagcaaggaaagacttttgtgaagggaggagattgaggaaatgtgtggtgaagtaagggaggttagcaagtgaggttaggggtggaaaagctttaagagaggagatgatggaggttagtggtttcagcggtgtggtgaagaaggttagtcccatgtgatggaggtactgaaaagaaggtcttgggagagatgagggaggaaagtcacctatgagagaaagtcatttctgaaagaagggaaaggaaatg

SEQ ID NO: 42796 - DNA, 2080 bp, Artificial sequence
  DNA replication origin
acagtattcttttttgtgtgggagttctactcaaaatagaaatagaaaatgaagaactcgctgactaagaaaaaatacacaatttatagttttgtttttcagcttacttttttagaggataagaagacttttagtattgtactattacaaatacagtaattcagaaatactttggtgttttagataaatagtagaaataaacctgaataatttgtagtaatattatgatttgtaaatgatcattaaaaatatcttaacattttttcaaagaacagaaatcatattttctaacttatttcaaataattgataaaacagcatatactttatttaattatgaatttcattcctcacaaaaacctagaaacccatgtagttgtgacatagtgtatagaagtctctattctttttagttgtgatgccactgcccaatctttgcctccctctttgactgtgggtggaccttggttgagaagacggaaaacctctagggagagcagggagaaagaagcccttgggattagaggtggggatgctgaagtctttgggcttgggtctggagctcaaaggcaggagactgtgggaaatctaaggcctttgtgcagatgagaacataaaatacgtttgtgagggggttgggagaaaaggcacgccattatgggtaatattgagaaagctgttttgagaaaaccatctgagacttaggaaggttatggaaggaaagaaggttgtaggaaaaggaaaagcagttcaggttgggagaatctggaggaggagggaaagactttgagtgaagcaagtgaggcagaaagaccattaagtggaaggaagaaaagaaggcttttggggaagaagtggaaagtacctttgggtggtgaaggaaggaaaacctgagtggggagaagaacttttggagagctgaaagtaggcttctgagagggagtgagtgaaggcctggaggagggtaaataaagaggtaagagaaggaatttgagggagaggggaaggccttagtgaaggtagcttagagagggagaggatgatataaggtaaaagaagggaagtaagggactgaagactttaagagaggagaaaagggctctgtgagataaggaatgaaaagcttttgagaaaaggcctgtgaagtgagcaaaggaaagtcattgtggggaggtgagaaatgaaaggaccttgattgaaggacaagaaaaacttttggaatggtgatgaaggagggaaggcatttgtgagggtaaaagaaggaaggcccctctccctctccctctccccacggtctccctctcatgcggaaccgaagctggactgtactgctgccatctcggctcactgcaacctccctgcctgattctcctgcctcagtctgccgaatgcctgcgattgcaggcacgcgccgccacgcctgactggttttggtggagacggggtttcgctgtgttggccgggccggtctccagcccctggccgcgagtgatccgccaacctcggcctcccgaggtgccggaattgcagacggagtctcgttcactcagtgctcaatggtgcccaggctggagtgcagtggcgtgatctcggctcactacaacctacacctcccagccgcctgccttggcctcccaaagtgccgagattgcagcctctgcccggccgccaccccgtctgggaagtgaggagtgtctctgcctggccgcccattgtctgggatgtgaggagcccctctgcctggctgcccagcctggaaagtgaggagcatctccgcccggccgccatcccatctaggaagtgaggagcgcctcttcccagccgccatcacatctaggaagtgaggagcgtctctgcccggccacccatcatctgagatgtggggagcgcctctgccccgccaccccatctgggatgtgaggagcgcctctgcccggccgagaccctgtctgggaggtgaggagcgtctctgcccggccgccccgtctgagaagtgaggagaccctctgcctggcaaccaccccgtctgagaagtgaggagcccctccgcccggcagctgccccgtctgagaagtgaggag

SEQ ID NO: 42797 - DNA, 1510 bp, Artificial sequence
  DNA replication origin
cgcctggtcgcccactcgggtccgctcggtccgcggtagcccgcgcacccagcgacccgacgctgcggcggcagccgctgcgggctcaggcgggctgggccgcccgcctggctggctgcgggccggcggcggcagcggcggcgggggcggccggggcagaggcagcggcgcggcgcggcagccggggcggcagcggcggcggcggcggcggcggcggcggcggcggcggcggcggcggcagcggctgcacaggcggcggcggcggccgcggcagcatcacacacttacacactcacagggggcggagcctggacagctagaagccgcgacatggagcaggcacgttatcatccccggatctggcaggggctcgccgcgcccgcccctgcctttcgggaaccctctcccaccccccactgtcaaaatcagctagtgggagcggccacagagctgaggacccggacccggacccgggacgcaggggccgtggcagggatacaggaggtgggctggcgggaccaggacgcgggcttcgggaatgggacccctctctgaagcccagcccacccccaccactgggaattagttttgaactagaaaagacagcacaaacagccgtggggttgaaggtcgccccctgccacctcaagcacagctccttgagcccccgagtagtggagcaaactttgcgggcctgagcatccctcaggtctgtagtgcgtagcacgcgggtccaggaaggagaaggcggtcaccttcaccagccccgtggctccacgtgcccgcacccaggccctccaggcatgcctttaggcgcgcacctagtaggtcagcgagctataggccctggattcagtgggcagcaaggataggaacaaatgactgcccttgcgtggtccttgagttcggggttaggatactgttaaactgggttccactgtcactttcctcgcacggtcaccaggtgccttgagcaaaagacttctgctagctcctcctctgagaaatgggaaaaccactgggtgtgtgcccagtatcccacgcaccggctgcccgtctcccttctggcctgaaattctctttctgcacgtggagggtttaaccgagcctcctactcccttcaacctccacctctgatccaggaaggagtggatccctttagccaattccctggagggaaaggttccctggcctccgtgcagagaaaggtctgtgggaaggggcgggaccgctttctggcatttcaggacatgagcattctggagtcctaggcatgtaatttgccttcttcgtgtcgttatacagagggaatagtattggcacatttttcaaatcctaaggctagaactctcttgggaaggacagcagactgagccctgacagagcagggtgccggtagctctgtgtgtgactccaagcaagtcacttatctgggcctcagtttctccataaaacacccagcagccctctggctcatacttctctgacattctcccttctatttgaatat

SEQ ID NO: 42798 - DNA, 915 bp, Artificial sequence
  DNA replication origin
caactttccaggtccccagtcacctttctaccatctttcaaaatgtctcagcgacaagtttagggtattttgtgaagagctgactcaacctttgaatctgagctggaggtcccttacaaaaaactacggctgcctcccagtgggaggccgaagggggtccatccggtaattaaatgtgcattgacatcagagctgcggatttggggggccaactccgaaaaccctcagtcttgaaagccaagcgccgaagtcggcctcgaaccaaggtcccctgagtggtggcccccaaagccgctgctccacccgggagtgcagggaacttgggctgagtcggcagaaggaaaggtgtgcgcgccgcgcagcgcagggatggaggtggcggcagcgggggcggtggccaccaaggaagcagagggctgctggccgcacctggccgttgcctttcccccatggcccgccgcgggcgttgggcacctggaaagttgagacatttcgggcgggcggcatccggggctcaaggaggccagaccggcaagccgctccgagagaaaagctcctgggaggtcgtgcggttcagccctcgggcggcaccgaattcgatgtgagccaaatgcaactctttagacttggagcgcaaagcgacgctttcgggtccgcatccctccctcttcccgcacctccccccaccccggcatccgacctaggagtcagcgcggccggggccagaggtggctgagagcaagtgggagggagtccggggcgccccccacgacagcttcagctcctcttaacaaaggcgaaaacctcagacttcgccaggagactcgctcatcaaaggagaaggcaaaaatcaacacctaccactgctgctccaagtcccagtctctgaaaaagtcgaatagatccatagcggcc

SEQ ID NO: 42799 - DNA, 1240 bp, Artificial sequence
  DNA replication origin
aacaaaatgaaaagtctcccatgtctacttctttctacacagacaaggcaaccatccgatttctcaatcttttccccacctttcccgcctttctattccacaaagccgccattgtcatcctggcccgttctcaatgagctgttgggcacacctcccagatggggtggtggccgggcagaggggctcctcacttcccagtaggggcggccgggcagaggcgcccctcacctcccgggcggggtggctggccaggcggggggctgacccccccacctccctcccggacggggcagctggccgggcggggggctgacccccccacctccctcccggacggggcggctggcctggtggggggctgacgcccccacctccctcccggacggggcggctggcggggcggggggctgacccccccacctccctcccggacggggtggctgccgggcggagatgctcctcacttcccagactgggtggctgctgggcggagaggctcctcacttctcagacggggcggctgctgggcggaggggctcctcacttctcagacggggcggttgccaggcagagggtctcctcacttctcagacggggcgtccgggcagagatgctcctcacctcccagatggggtcgcagccgggcagaggtgctcctcacatctcagacgatgggcgccgggcagagatgctcctcacttcctagatgtgatggccgcagggaagaggtgctcctcacttcctaggtgggatggcggccgggcggagaccctcctcactttccagactgggtagccaggcagaggggctcctcacatcccagacgatgggcggccaggcagagacgctcctcacttcccagatggggtggcagccgggcagaggctgcaatctcggcactttgggaggccaaggcaggcggctgggaggtggaggttgtagtgagccgagatcatgccactgcactccagcctgggcaccattgagcactgagtgaacgagactccgtctgcaatcccggcacctcgggaggccgaggctggcggatcacttgcggttaggggctggagaccggcctggccaacacagcgaaaccccgtctccaccaaaaccagtcaggcgtggcggcgcgagcctgcaatcgcaggcacttggcaggctgagtcaggagaatcaggcagggaggttgcagtgagccgagatggcagcagtacagtccagcttcggctcagcatgagag

SEQ ID NO: 42800 - DNA, 898 bp, Artificial sequence
  DNA replication origin
tgcccggctgcgaccccatctgggaggtgaggagcatctctgcccggacgccccgtctgagaagtgaggagaccctctgcctggcaaccgccccgtctgagaagtgaggagcccctccgcccagcagccgccccgtctgagaagtgaggagcctctccgcccagcagccacccagtctgggaagtgaggagcatctccgcccggcagccaccccgtccgggagggaggtgggggggtcagccccccgccccgccagccgccccgtccgggagggaggtgggggcgtcagccccccaccaggccagccgccccgtccgggagggaggtgggggggtcagccccccgcccggccagctgccccgtccgggagggaggtgggggggtcagccccccgcctggccagccaccccgcccgggaggtgaggggcgcctctgcccggccgcccctactgggaagtgaggagcccctctgcccggccaccaccccatctgggaggtgtgcccaacagctcattgagaacgggccaggatgacaatggcggctttgtggaatagaaaggcgggaaaggtggggaaaagattgagaaatcggatggttgccttgtctgtgtagaaagaagtagacatgggagacttttcattttgttctgtactaagaaaacttcttctgccgtgggatcctgttgatctgtgaccttacccccaaccctgtgctctctgaaacatgtgctgtgtccactcagggttaaatggattaagggtggtgcaagatgtgctttgttaaacagatgcttgaaggcagcatgctcgttaagagtcatcaccactccctaatctcaagtacccagggacacaaacactgcggaaggccgcagggtcctctgcctaggaaaaccag

SEQ ID NO: 42801 - DNA, 1119 bp, Artificial sequence
  DNA replication origin
cacccttgaaggtcaagctttcccatgagtggaaaaccagattttctccactaccattttccagactatgcttccctctaacaagatgtcccgcacaatctgtgccatctgacaatagctgaagctccccgcccccaaccctcagtgcacgaagcagcacacacccacagctagaggttcccagacatacctgcgcaaaggcattctggaagaggaggctgtgggatgccagttggtcaatatttggggacctcaccagcttatccccataacagcccagggaggggcgcaggtcatccacgatgatgagaagaacgttcagagcatctacacaggagggaggggctttggtgaggtaacctgcactgacactgaaccctccctcatggtaggtgctaggttactaagaggcccaaggctggaccctgcaccttaacagcctagccagggagggcgctgtgcctcagcaagggtgggagtggggctcgaggaggaagcctgagtcctgggtggcagggttaggctttggtcatggcctccaacctgggtgaggaagcgagatagtgagtgaaagatggtggaaaggaaagatgaatttaggaaaaaaagagaatgatgtatgcaggaaaggacagatggttggatggaggaagataaggaggaaaagatgaatagctgaagggaagaaaggatggagagaaggaggggagaagagagagaaatatgaatggatagaaggtaaaagggacggatggaccaatggagggaggaaaggagggggaaagatggatggatagagatgggaaagatggggggaaagaggaagggaagcacggagggataggagatggatggatgaatagatggaaagagggaagggagggatgaagggacggtaggaaggagtgaaaaatggagggagggaacgaatgatggatgaaagaaggaatggtaggagagaggaagggtaaaaagaatggatataaacaaagaaggaaggaaagaaggaaggaggaaggaagggagggaggaagggagaagagatggcagggagggcgtgggcggcacctgtggtcgagttggcctgcgtttcggatccgagggcgacgcagacggagc

SEQ ID NO: 42802 - DNA, 1772 bp, Artificial sequence
  DNA replication origin
ttttaaatgtttctactttcatttcttctagtagattgtccctgtctttctaaatactatgctatttctatatcaactttctaatgttttcaactttagacattgctgacttcttcctatgatagatgagatcacttatccattcctctttttatgtacatatttttaaccttggattttggaaattgatcaaacctatacaagattacagaaaatagtataataaaccccaggtgttcatcaatgaacttcattggttatcaactcatgacaaattttgtttcatctctccctgccattttcccttctccttttactatatagatttattgccatttttaagttttctattgtttacttttgtatctttaagtaatatccctaaatctgtatttctctttctatgaactggggacagcgactattgatttattattattattattattatttttttgcgataggctggggcaaaggagacaatcctaaattgctaaccctaaattaatgtgcctacatttcctgccatctcccttcctcctcccagctttttgtcaactgttgctgcaggccaggttcccaaggaagctgactaagatgtagagtaatgtgcaggaagtttcttagggagtactcttaggatcaacacctgtagaaggggaggggagggaagaaatcaaaattcaacagacagagaaagtgggcagtctcaaaaaaggcttcagttaaccccacagggagctctgaagctgaaatggcctttcagagatgtcccaagttggggtaaggggctgcacctttgtaccttcaagttgaatcactgatgtgggcttcctgagaacaggggtgaccttggctgaggtacctatctttttctaagacaatttctgatgagggctaacgacagctaacagctctcaagccagctagggaaataaaatttttggtgttgaagggagatctgagcagtgcaccacagcaccatcacagctgtatttgtaccttcccattgtccattgttgtttagtcataattaagtcatctgggctttgttatagattgattctcaaagttgaaaatcaaactgtgtttgcagtattaggacggtataatagtattcagtacagtacagtgtagggctaggattccatctccccacaattgctgctctctctgtttggcgcacccttcttgcagacctcaatgcggcttgctccctcacttgcttcaaaattttgttcaaatgccacttcactagtgaggccctgcctggccaccccatagaaaataacaagcatgccccgcacccacgctttatttttctccagaccgggtatgcccaccgacactctctatatttttttattgttttaagctccaccaaagcagggacatagagccccagtgccaccaacagcgcctggtatacatatttgcgatacttaataagaattagttgaagaaatgaataggaaagggagtccctttagatggaggaagggactttctcaaaaggcctcatggaaggagaatggcattgaggctggcttacaagaagtgtgtcttttataaaaagaaggaagggcagggcttccaggtgaaaggcatagcacaagcaaaggcaaaaagacgggtaactgctagttgttaagggcagtggctgaatcgctatacccctagcagttctacacctaggggcctgcgggccgctgggtctgcgaagcttgcaaggcaactggcccgcccccgctctgcgcctgtctctcggccac

SEQ ID NO: 42803 - DNA, 1623 bp, Artificial sequence
  DNA replication origin
accgctttgaccctgattcatggtttcccttcagatgctttttggtcagcctgctttcctcgtctaggaaatggcttttgctcatttttctattgagtcacttgccttgttgatatggagttgtaggagctctttctgaattctgcctctaaccccatgttggctttttgtatttcagagacctcgtctgctcaggggcttgttcttacatcttttgcagggctgttttgaagtcagtattcacttaagcactccaaattgtaagtaaccccagaggtcatggagtgtcccactgcccctccatctggaggcagtgacccctctcccacagaggaggtgctcgcatgtgtccagtgccctgcccattagattagagagggttcccttttttgctctcttgcattcatttgtccgccttttagctttacttttctgccctggactcacacagggtcatgtgaacgtgtggtgtagcaggaggagagaggtaaagtggaggaataggagctggaagggaggaggagggaagaaaaaaggagggggagggggaggagagggagtgggttggaggagggaaggaggaggagaaggagaggaggaggagatgagaccaaggacaagaggtgaaggaagagaggaggacacagaaaagagaagaaagaggagaggaggagacggagaagaggaggaggagcagcaaagaaggaagaagaggaagaggactagaagagcaagtaaggaggaggaggggggagtaggaggagaggagaaggacagaaggagaaggagaggcagatgaggagaggaggtcgaggagaggaggaaatgagaaagaggaggagaaaaggagaggagagggatgaggggggaggaggaagagaaaacaggagaaggagaagaggaggagtgagagaaaagaggaggagaggaggggggaggacggggaggaagggagaaggagagaaataggagggaggaaaggagaggtgtaggaggaggaggacaggacgagaggaggagcagaggaggaggagaaggagaggaaggggaggagatttggaggaagaggagaggtggaggaagaaaggagaaggcggagaagaggagaaagcagagaggaggaggctgaagaaaggaggaccaggaggagaggaggaggaggaaaggaggaagaggaagagtggaataagaggagcagaggaaaaggaggagggggtgggggaggagtggagaggagaggaggaggaacagagttggaggaggtggaagagagaagagaaggaggagaggaagagagaaggaaatgagaaggagaaaagtaggaagaagagagaagaggagagagagaggagaggatgaggaggaggagaggagaaggagagcaggaggtgggaggaggaggagagtaagaggaggaaatgaggaggaagaagaaagaaggacagcagatggagaggaggaagagagaattaggagaggaggaagaggggaggagaggaggagaaggaaacgaggaggaggacgaagctgcatcacccttatcaggttccagttctcggtgcgccccgttctgcaagacactctcctgtggtcagccctggcctgcagaggattcccgcgctg

SEQ ID NO: 42804 - DNA, 1212 bp, Artificial sequence
  DNA replication origin
ggaacactaggcaggatcaaatgtgaaccatctccagagaagggcaacttcctcctgggcctcagagtcaaaaaagcacagtgaggagaggtggctgcactctggaaagtgtcagtggggaggcaaaggaagaggaaggcggtgacaggctcagaaaacaggaggagttgcacggaaattaggctgagcaaaaagaatgcttctctaggggagcatgtgggcagaagagaaggactgcacagccggggatgctgagcacggagaggcaaggtgatggcaaattcgcaagggacagctctagccagggaggctagcctgccatggagggagaggacagagcaggagagggcagggttgggggcagggggtgggggggcagggtagggtagggaagggaagcggggagagggaaggggaggggaggggaagggatgggaggggaaggaaggggaggtgaggctcagaaggccaccgggatggactgggagctctgcagggggctccctggtgatgaggaaggaaggaagacctgagcgggggctgtggtttcaggaaggaggcagtatcctgggggaggcaggcagagggtacagtcagctgcaaagcaggatctttggaaaaggcaaggacttcctaaaagagatatgatgtgtggcacgataggcatgcaagcaaggcctgaagaagcaagcagaacttgaggagacacaccgctggccccaggagtgggggtcagttcagtgtgtgctactggggtgcagccaggcacagtggtttcaagggagcacagcaaggaacccaagaaggccccgcatgtctgcagttggctgactattgcccgggactccagagcatccatggagggccccacaggggaaggcaggagcaggacgggtctagggaggtgaaggccgacctgacctgctaagagacgagaagagagggaggggaaagtcttgttcctgccaggacattgttaatgagaggagtgagaaggcagcaggtgaagagagtgtagcatggaaggcagaaatcagagcgtttttgggtttcgtgctgacctgctattgggaatgaaaatcaagactcaggtgcattctggtccctttctcagggttagccgaacaccacccgcatccctgcctggcctgttgatgccattcttcctaggcccactcaccgctgcagctgctttacttgcacttcctctcc

SEQ ID NO: 42805 - DNA, 1792 bp, Artificial sequence
  DNA replication origin
gactgacagaaacaattgggggctgggttgagggcggggctgagataagaggcggggtgtggggcagggccgggcggggctgagagaaaccattgtgggcagggccgtgggagagctgagcgaggagaagctgcaggaagagctcgcggactcttgagaatcagcagggggaggcaggtgtccgctgagagaaggagggagggggagaaagaaatcactgggaggggctgggggcggggtttttaaagcagctgcgtgagaagtagggcggggctgggagaggcggggctctgggggggctgagaatgctggggaaggtttgggggcggggctttggaggcagccacaggagaagcaggtcggggctgcgggcggggctcggggtggggcggggctgagagaaactgctggggagggggccgagggcggggctttgggagcagccgcgggagaagcggggcggggcagggaggggaggggcggggcagggaggggcggggctgagagaaactgctggctgaggtcggggctttggaagcagccccgcgaagagcagggcggggcaatgggagaactgagcgaggagcagctgcgggaggacccctcggactcctgagaaccagcttaggggagcgggggcttggggaggtgtagggtggaatcacgagaaagctctgtgggagggcctggtgcacagctcagctgcagcgtggagctgagggaaagccgggcgttcctggaggaggagcagggcggggctgtggcaaagaggtgtgggagcagatggggcggggctgcgggaaattgctggagaagggggagccaagctggagtaaggctggcgggtgagaatggtgggggaggagctagtgcagagctggaggaaagagctgaaaggtgctggggtgggcagaggggtaggagaagcgggacggggctagaggaggcggagctgggactggagatgcagggtgagcagggtggggctgcagcaggaactgggttagagcttctggaggagccgcctgcaagaggagggcgtagttgtgggaaagagctgtgggtggaactggttaagtgctgggaggaggaagagctgggggcggaacagctggggcggagctgccggaggaggagctgggggtggagatgctggtgaaatgaagcagagccgaactgggggtggagctgtgggtggagctgggggagggagctgaggcccttctgtgatgcacccttaggcaagagtcaaaacttgcccgcagcgacctaactgcacctccagtgtctacccccatagggcacggaagcagcaagaagggcgggaacacttgactggggtctatgcagctctaggctgagtcttgcagggctgagccccccaggcctgctctcctgtgtcctagccgctctgtcagtgcctgccagtggggtccggaggaaccgtctctttaacgtctcttttgcaggtgatgagaaacatccccactcttaatgtcttgcctcctccgacctaagtcgcccagcacacagcccaacttccctggcaaacttgcttttcaaactctcttctctcagtcacgggctcaggttctgtagtgctgccatgctttactcctctgtccctccccttatctagtctcccgcattgacttcataaccaagttctgggtccctgcctctggagtgcctgatgagacaaaacggctcctcgtcctgcatccccgctgctacttccagaattcaggcctcgtggtctggagcctgcactgttccatgagcctcctgagca

SEQ ID NO: 42806 - DNA, 1017 bp, Artificial sequence
  DNA replication origin
ccggcttttcgccacaggaatgaacagtcctctgcttccccgagacccagcgaggccaccggagccaggacgatgggctcccaagcaaggagacgtgggccgctgtgagaagagggagcgcctggctagtgtccaggctgcaaggtcgttgccgctaactccgggaaaccagtggccagtgacaggtgttagcggtctataactcttccgctttcatacagctcccgtcatccctttcacgaagaacgtacgtgggcgcgcaatcacgcatgtatgcacaccacgcacgtacgcgggaggcacgtactcagccatgcatatagacagcaaacattatgaatctcgcattctcgaagacacgcactgacgacatcacgcacgtacgcacgccctggctgctaggagacgctattctctttacctggccctgatgcgcgccagccaaccaggccaaggccaggggacctcgagaccggcagcctcgacgaagaaccggaaggaggaaaaggaacgggagggaggaagagtaagtggaagggtgggacgaggacaccaggcaggagttttgggcccagagctgctataccagcagggaggagctgggagaaaccgctggggagggggtggaggcggggctgagaggaggagggcggagctgggggaggggccgagcgggactgacagaaacaattgggggctgggttgagggcggggctgagataagaggcggggtgtggggcagggccgggcggggctgagagaaaccattgtgggcagggccgtgggagagctgagcgaggagaagctgcaggaagagctcgcggactcttgagaatcagcagggggaggcaggtgtccgctgagagaaggagggagggggagaaagaaatcactgggaggggctgggggcggggtttttaaagcagctgcgtgagaagtagggcggggctgggagaggcggggctctgggggggctgagaatgctggggaaggtttgggggcggggctttggaggca

SEQ ID NO: 42807 - DNA, 2172 bp, Artificial sequence
  DNA replication origin
cccccttttcataaggacgccagccacattggatgcgggtccgccctgatggcttcagtctcacttgattgcctctgtaatgactctgtttttatatataaggccacattttgaggtgctggggtttaggacttcaacatacgcattttaagaggacacaatgcaacccatcacaactgacaaaggctctgaggtagaaacaagcttggcatgttccctcaggggatggaaggcctgtgtggcttcagggtggtgaataaaggggagaggagaggacgtggctggggtgggaaaccagatcaggagggaccttgagtgccctgagaggaagtgtggattctgtgctagttggggcagggagcccttgaaaagtttcagtagaggagtgacataatctcattgtccctgtaccaagatcattccgatggcagtgtggtcacaagagtgcagaggacaagtgctgggggggggtgggggtgctatcaggagacttcttcagaaggcagggggttttaggggattggattgggattgtggccatagagattatggaaagggatcagattcaatgtcggttttggacacagtgccacgggatgtgggccgcagatgtgggaaagaaaggcagggcagagagcagctaggtctggggcaggaacgctgtagctggtgatgccactcacagaggtggaagggaggtggacttggtggtgatggttggggtcctgagtatgtacgggcctgtccacctaaggctgagtctgaaggggggtggcctgcaccacgggattcagagcaggacggtgagcaacgtgggggtcccagaaggagggaaggagtgtgcccagccatgctggggctgctgagcatggactaagatgaagacaggactggcatgaggccggccatgggtgcttgtggggataggtcagtcagtggagtgggtggtggggggggtggggaataaagggagaaaggtgggggtgggggcagaaggttcagagaggaagtagagactgcgcatgtagacagctcttctgaggtctcggctgttcagggttgtagagaagggaggcagagtgggaggcgcgcgtgtgctcagagtagggatgctgagcgagcatagatggtggctggtggcacccagggcccggagtgagccagaggagcagggtccagagcacagcaggcaaccggctcagctgaggcagctcaccccagaggcgggagaaaagcaggagatctggagctcagaaggctgcagtgcagactgggaaaggagtgaataccaggcagctttggccctatcagggctttgtctcatgagggtgggtatattttcttaaaatcatagagcgtactagaggttgcgtttatgtgttgaaaggaaggacagagagaggagtaggggcagctcaagggtggagttcagggccgggggcggggccacgggcctgaggggtgagggcagccactatttctgactgttctattaggtgccacgtactgggctgggtgctcttggtgccttatctcccttcctcacagccatgtggaaactgaggcatctcaagagtctatgactgggctgaggttctggtttcgagcccagggttccttccaaggcacagggccgtcctccatgcaagaggaggggaccctctcccaagccagacacgcaggaggctgggcaagagttgtgggaagtcagagcccgtgtgactgtgggctggtgcctcattctcctcagccatagagtgggcctcacagtaccactgaccctgctgggttacttgaagattcaatttgatgatccgaggatcatgccatcccagaggctggcacgtggaaggcatgtgtgtggggttgctagttgttctgattatcattcttcttttctcagctcagattgggacaggggcatctgctgacagtggagagcagtggtaggggaaggggcttgaggaaggtggcacccagaggggtggagaggagatgtctgactgagggccatctgaggtcacggtgcatcctgaggacagagctgagattggatatcaacgatgtgggctcagcagccctggagtaggagctgggaaggtcagtgccttggtggcggcagggccagggcactgagagtattggcagggcacagcaggggaaagggaagag

SEQ ID NO: 42808 - DNA, 838 bp, Artificial sequence
  DNA replication origin
gggttaggggtgtggaggcgttcagccctccctcagggttctgaccttgatgccagtcagagcctgggcccagcctgatacgcccgaccccgcggggtggtccagggctggcacaggggcggcgctgtattatttggggtcctctatctggggcggggggtcttgagtcctccctcagggtctcaccttgcctcctcacagagcctgggcccgcttccctccaccgatatcgacccgcccctcacagcgaggcccccgctactctctgacccccagtgtgggagtcactggccgtacatccgggcacctggggcttccctgggttgacaacaggggcggaaccagattctgccgcgggagagttgggggggtggggtggagtttggggtggggtggggtggggtggggtggggtgtagagtggagctgaggatggggctggggaacctggggctgtaggtcatggttgggttgggggggcccagcctccctcagggtcctggccttgatgcccggcagagcctgggccctgccctctcctaaccagccctgccctggtcacaccaagctctcactccagagtgcccagcagcttgagcggcggagggagggggtcggcccagcctcacaagtcagccccagatcggcccccgggtggtccagggctgggagcagagacggcacttggttctttcgggtcctctatctggggtggggacatcctcagtcttccctcagcacctcaccttgactcctcacagagcctcggccagcttacctccaccggtatcaagccgcccctcagaaggaggcctctcccttctctctgacccccagtg

SEQ ID NO: 42809 - DNA, 927 bp, Artificial sequence
  DNA replication origin
gatggggctggggaacctggggctgtaggtcatggttgggttgggggggcccagcctccctcagggtcctggccttgatgcccggcagagcctgggccctgccctctcctaaccagccctgccctggtcacaccaagctctcactccagagtgcccagcagcttgagcggcggagggagggggtcggcccagcctcacaagtcagccccagatcggcccccgggtggtccagggctgggagcagagacggcacttggttctttcgggtcctctatctggggtggggacatcctcagtcttccctcagcacctcaccttgactcctcacagagcctcggccagcttacctccaccggtatcaagccgcccctcagaaggaggcctctcccttctctctgacccccagtgcgcacgtcagtgacgtcacatccggcccccaagcctggagcttccctgggttgccagtaggggctgaaccgggttctggcggagtaggggtggggatggggataggggccctcagtcatccctcagggggtcctgaccttgatgcctgggtctcgatccccattctctgcccattgggtctgctcctctcggaccaagtctctgactcccagtcacatgaggtggcagtgaggggaggggtgtggtcggggtgacaacattgccagggtcttccagggctgacaggaagggctgagctggattctgtggcccctctatgtggggaggttggaccttcagtcccctctcaggagggttctcctcctggctcctggctctttgatgaagtgatgtgtgggagatgatctgtttatgtcacctttgagcatttgcccagctgcacgcgttgcagagaatggctgcgggtcccaggctagatgctccctggggggctgcagcacctgtgattgtaggacctgt

SEQ ID NO: 42810 - DNA, 1127 bp, Artificial sequence
  DNA replication origin
cgggtcctcgggctgcagcatctcgcccgccgtgcctccccggagccgaacaccagcccgcgcccgagcccgcagcgcggactcccgggggcgccaacgacgccgcctcacctcgggttgaagtcctggaagaggcccctcaggttcatggcggagaacttcaccgcggcgtcctcctcctcctcccccgcaccccgtgctgcacagcctgcgccttacagcgggttcatggcgccagcgccagccgcgtccacgctgctgctcccgctactgctgccgtccccgctgccgtcgccgtcgccgtcgccgccgccgccgccgccgccgccgccgccgccgccgccgccgcccggagaaacctgagccaccgccccctgcccctccttccgggcttccgtacgagggccgcgcatgcgtccggagccccgcccagagcgctcctcgctgggaggtccccatccttgtgtccgcacgcgaccggcggaggagatggcagggggatggaggctgggagtgagcagggccccgaggaaggggatgctgacgggctgaaggcctgcagggagggagcgcgccgcccgggagtctggcgggcagatcttggcagacacctgtcaccttggcccgcgctaccttctggagattttccccagtgacgactgagccctgggagtagtgacaatgagtgagacgttgcatttttggcgatgtcatcccaggcttcacctgtcacatctgtcaacgactccaaagtttgggtcccaacttcccttccaattcccaagccagcgtgtccagatatgctggctattccctactcaagttacctagcaccaaagtcacttcccgtgccaaccgccttcccctcctgggttccctttttcccttagcagcaggcctattcgtacgcaggggggtattcaagcaggagacgtggaaatcatcctcatttttctaacccagttcagagcctccttggatcctgtctaaactttgtggtcacttcacacctgacctctgcctccactccaggctgccctacttacaagtaccaggttcatcttccttgggcaagtcaacatctttgagtctcagtttttctcctccgcagaatggaaatgataaaa

SEQ ID NO: 42811 - DNA, 800 bp, Artificial sequence
  DNA replication origin
ctccagagtgcccagcagcttgagcggcggagggagggggtcggcccagcctcacaagtcagccccagatcggcccccgggtggtccagggctgggagcagagacggcacttggttctttcgggtcctctatctggggtggggacatcctcagtcttccctcagcacctcaccttgactcctcacagagcctcggccagcttacctccaccggtatcaagccgcccctcagaaggaggcctctcccttctctctgacccccagtgcgcacgtcagtgacgtcacatccggcccccaagcctggagcttccctgggttgccagtaggggctgaaccgggttctggcggagtaggggtggggatggggataggggccctcagtcatccctcagggggtcctgaccttgatgcctgggtctcgatccccattctctgcccattgggtctgctcctctcggaccaagtctctgactcccagtcacatgaggtggcagtgaggggaggggtgtggtcggggtgacaacattgccagggtcttccagggctgacaggaagggctgagctggattctgtggcccctctatgtggggaggttggaccttcagtcccctctcaggagggttctcctcctggctcctggctctttgatgaagtgatgtgtgggagatgatctgtttatgtcacctttgagcatttgcccagctgcacgcgttgcagagaatggctgcgggtcccaggctagatgctccctggggggctgcagcacctgtgattgtaggacctgtgagagaagatgcacac

SEQ ID NO: 42812 - DNA, 864 bp, Artificial sequence
  DNA replication origin
catggtggtggtggctgggttaggggtgtggaggcgttcagccctccctcagggttctgaccttgatgccagtcagagcctgggcccagcctgatacgcccgaccccgcggggtggtccagggctggcacaggggcggcgctgtattatttggggtcctctatctggggcggggggtcttgagtcctccctcagggtctcaccttgcctcctcacagagcctgggcccgcttccctccaccgatatcgacccgcccctcacagcgaggcccccgctactctctgacccccagtgtgggagtcactggccgtacatccgggcacctggggcttccctgggttgacaacaggggcggaaccagattctgccgcgggagagttgggggggtggggtggagtttggggtggggtggggtggggtggggtggggtgtagagtggagctgaggatggggctggggaacctggggctgtaggtcatggttgggttgggggggcccagcctccctcagggtcctggccttgatgcccggcagagcctgggccctgccctctcctaaccagccctgccctggtcacaccaagctctcactccagagtgcccagcagcttgagcggcggagggagggggtcggcccagcctcacaagtcagccccagatcggcccccgggtggtccagggctgggagcagagacggcacttggttctttcgggtcctctatctggggtggggacatcctcagtcttccctcagcacctcaccttgactcctcacagagcctcggccagcttacctccaccggtatcaagccgcccctcagaaggaggcctctcccttctctctgacccccagtgcgcacgtcag

SEQ ID NO: 42813 - DNA, 2289 bp, Artificial sequence
  DNA replication origin
ttctccctgtgtgcgtgactgtctctcaaatcccccttttcataaggacgccagccacattggatgcgggtccgccctgatggcttcagtctcacttgattgcctctgtaatgactctgtttttatatataaggccacattttgaggtgctggggtttaggacttcaacatacgcattttaagaggacacaatgcaacccatcacaactgacaaaggctctgaggtagaaacaagcttggcatgttccctcaggggatggaaggcctgtgtggcttcagggtggtgaataaaggggagaggagaggacgtggctggggtgggaaaccagatcaggagggaccttgagtgccctgagaggaagtgtggattctgtgctagttggggcagggagcccttgaaaggtttcagtagaggagtgacataatctcattgtccctgtaccaagatcattccgatggcagtgtggtcacaagagtgcagaggacaagtgctgggggggggtgggggtgctatcaggagacttcttcagaaggcagggggttttaggggattggattgggattgtggccatagagattatggaaagggatcagattcagtgtcggttttggacacagtgccacgggatgtgggccgcagatgtgggaaagaaaggcagggcagagagcagctaggtctggggcaggaacactgtagctggtgatgccactcacagaggtggaagggaggtggacttggtggtgatggttggggtcctgagtatgtatgggcctgtccacctaaggctgagtctgaaggggggtggcctgcaccacgggattcagagcaggacggtgagcaacatgggggtcccagaagaagggaaggagtgtgcccagccatgctggggctgctgagcatggactaagatgaagacaggactggcatgaggccggccatgggtgcttgtggggataggtcagtcagtggagtgggtggtggggggggtggggaataaagggagaaaggtgggggtgggggcagaaggttcagagaggaagtagagactgcgcatgtagacagctcttctgaggtctcggctgttcagggttgtagagaagggaggcagagtgggaggcgcgcgtgtgctcagagtagggatgctgagcgagcatagatggtggctggtggcacccagggcccggagtgagccagaggagcagggtccagagcacagcaggcaaccggctcagctgaggcagctcaccccagaggcgggagaaaagcaggagatctggagctcagaaggctgcagtgcagactgggaaaggagtgaataccaggcagctttggccctatcagggctttgtctcatgagggtgggtatattttcttaaaatcatagagcgtactagaggttgcgtttatgtgttgaaaggaaggacagagagaggagtaggggcagctcaagggtggagttcagggccagggggcggggccacgggcctgaggggtgagggcggccactatttctgactgttctgttaggtgccacgtactgggctgggtgctcttggtgccttatctcccttcctcacagccatgtggaaactgaggcatctcaagagtctatgactgggctgaggttctggtttcaagcccagggttccttccaaggcacagggctgtcctccgtgcaagaggaggggaccctctcccaagccacacacgcaggaggctgggcaagagttgtgggaagtcagagcccgtgtgactgtgggctggtgcctcattctcctcagccatagagtgggcctcacagtaccactgaccctgctgggttacttgaagattcaatttgatgatctgaagatcatgccatcccagaggctggcacgtggaaggcatgtgtggggggttgccagttgttctgattatcattcttcttttctcagctcagattgggacaggggcgtctgctgacagtggagagcagtggtgggggaaggggcttgaggaaggtggcacccagaggggtggagaggagatgtctgactgagggccatctgaggtcacggtgcatcctgaggacagagctgagattggatatcaacgatgtgggctcagcagccctggagtaggagctgggaaggtcagtgccttggtggcggcagggccagggcactgagagtattggcagggcacagcaggggaaagggaagagaagcagagcgtgggactgtccctctgtgctggaagagggctaacaccagccccgactctccgctctggctaggccgagggggccc

SEQ ID NO: 42814 - DNA, 672 bp, Artificial sequence
  DNA replication origin
ccacagagctatgcaccgcccggcctggggtccaggcgagcttacagcacaggggccaagcgggaggcagggaagaccgggccgagatggggccgctgtgtgtggagcagcacttgcagacgcaggtcgcgggtacacgcgcttagaaggaggggggccgagaccatggggagagcaagggacaccaaagggcgcttcgggcgcgccccgcacgggttctctgcccgaaacccaggggaaagaaaccccagcccgcaagtaccgtctgcaagagggccgagcacacgggctccggcatcaggggccctggtacctttcagccgcggccggtctcacggcctctggaccctgagagtcgtgggcgttcagggccgactctggcttttggcctcagagtacagtcctccgcctcctcgcgacccagcgaggccaccggagccagcgaggagacgtgggccgcggtgagaagagagagcacccggctcgtgtcagggctgtaaggtagctgccgcttactcccggaaaccggtggccagtgacagatgctagcggtccataacttcggctttcatgcagctcccgtcgtccctttcatgaggaacgtacgtgtgcgcgtaatcacgcacgtacgtacaccacgcacgtacgcaggaggcccgtattcagccacgc

SEQ ID NO: 42815 - DNA, 2072 bp, Artificial sequence
  DNA replication origin
ggggaggggttgggggcggggctttggaagctggtgctggagaagcagggcagggctgggggaggagtggggcggggcggggttcggggggggctggggctcggggaggggtggggcggggctgagggaaccgccggggaggggctcgggggcggggctttgaaaacagcctttggagaagcggggctgggggggcggggcagggccgaggggaacctctggggtggggctggggggtggggtttgcacgcagccacaggagaaacagggcggggctcagaaaagggttggatcgggctgagagagaccgctgaggggggtgctgggggcggggctttggaagcacccgcgggagaaacagggaggagatggggagaggcggggctcggcgcggggcggggcttcggaggcagccgcgggagaagcaggggggggttcggggcagggcgggtctgagcgaagccattggggagcggctgggggcggggccttttaaccagccgcaggaggagccgggtggggctggggcggggcggagctgagagaaaccgctgaggatgggctgggggcggggccttggaagcaggcgttggaggggcggggtagggccgggccgagagaaaccactggggagggtctggggtcggggctttgccatcagtggtgtgaggagcaggccggggcagtgggcaattgagcgaggaacagctgcgggaggactccgcggactcctgagaaccagcttaggggagcggcggcttggggaggtgtagggtggaatcacgagaaagctctgtgggagggcctggtgcacagctcagctgcagggtggagctgagggaaagccgggcgttcctggaggaggagcagggcgaggctgtggcaaagcgctgtgggagcagatggggcggggctgcgggaaagagctggagaaggaggagccaagctgcaccaaggctggcgggtgagaattgcgggggaggagctagtgcagagctggaggaaagagctgaaaggttgttggggtgggcagaggggtaggagaagcgagacggggctagaggaggcggagctgggagcggtgatgaaggggtagcagggcggggcagtgggaaagagctgtgggaggaggagctgggggtaagaagctggggctgtggctgcagcggggactgggtcagagcttctggaggagccgcctgcaagaggagggcgtagttgtgggaaagagctgtgggcggaaatggttaagtgccgggtggagcaggggctggcgtcggaatagctggggcggagctgcgggaggaggagctggggggcggaactgtgggaggaacagctggggcggagctgagggaggaggagcaggggggcagaacagctggggtggagctgtgggcggagctgcaagaggagaagttggggacggacttgcaggaggaaaagctaggggtggagctgtgggtggagttgggggagggagctgaggcccttctgtgatgcacccttaggcaagagtccaaactttcccgcggcgacctaactgcacctccagtgtcttcccccagagggcacagaagcagcaagaagggcgggaacacttgactggggtccatgcagctctaggctgagtcttgcagggctgagccccccaggcctgctctcctgtgtcctggccgctccgtcagtgcctgccagtggggtccagagggaccgtttttttaacgcctcttttgcaggtaatgagaaacatccccactcttaatgtcttgcctcctccggcctaagtcgcccagcacacagcccaacttccctggcaaacttgcttttcaaactctcttctctcagtcacgggctcaggttctgtagtgctgccatgctttactcctctgtccctccccttatctagtctcccgcattgacttcataaccaagttctgggtccctgcctctggagtgcctgatgagacaaaacggctcctcgtcctgcatccccgctgctacttccagaattcaggcctcgtggtctggagcctgcactgttccatgagcctcctgagcaacctggagtc

SEQ ID NO: 42816 - DNA, 1242 bp, Artificial sequence
  DNA replication origin
ggcaggatcaaacgtgaaccatctccagagaagggcaacttcctcctgggcctcagagtcaaaaaagcacagcgaggagaggtggctgcactctggaaagtgtcagtggggaggcaaaggaagaggaaggcggtgacaggctcagaaaacaggaggagttgcacggaaattaggctgagcaaaaagaatgcttctctaggggagcatgtgggcagaagagaaggactgcacagccggggatgctgagcacagagaggcaaggtgatggcaaattcgcaagggacagctctagccagggaggttagcctgccatggagggagaggacagagcaggagagggcagggttgggggcagggggtgggggggcagggtagggtagggaagggaagcggggagagggaaggggaggggaggggaagggatgggaggggaaggaaggggaggtgaggctcagaaggccaccaggatggaccgggagctctgcagggggctccctggtgatgaggaaggaaggaagacctgagcgggggctgtggtttcaggaaggaggcagtatcctgggggaggcaggcagagggtacagtcagctgcaaagcaggatctttggaaaaggcaaggacttcctaaaagagatatgatgtgtggcacgataggcatgcaagcaaggcctgaagaagcaagcagaacttgaggagacacaccgctggccccaggagtgggggtcagttcagtgtgtgctactggggtgcagtcaggcacagtggtttcaagggagcacagcaaggaacccaagaaggccccgcatgtctgcagttggctgactattgcccgggactccagagcatccatggagggccccacaggggaaggcaggagcaggacgggtctagggaggtgaaggccgacctgacctgctaagagacgagaagagagggaggggaaagtcttgttcctgccaggacattgttaatgagaggagtgagaaggcagcaggtgaagagagtgtggcatggaaggcagaaatcagagcgtttttgggtttcgtgctgacctgctattgggaatgaaaatcaagactcaggtgcattctggtccctttctcagggttagccgaacaccacccgcatccctgcctggcctgttgatgccattcttcctaggcccactcaccgctgcagctgctttacttgcacttcctctcgtcatccgaccacagatcagacctctgctgctcgctgccg

SEQ ID NO: 42817 - DNA, 1761 bp, Artificial sequence
  DNA replication origin
cgacctcaggtgatccacccgcctcggcctcccaaagtgctggggttacaggcgtaagccaccgtgcctggcttgcccatttttctattgagtcatttgccttgttggtatggagttgtaggagctctttctgaattctgcctctaaccccatgttggctttttgtatttcagagacctcgtccgcacaggggcttgttcttctgtgtctttgcagggctgttttggactcagtattcacctaagcactccaaattgtaagtaaccccagagatcatggagtgtcccactgcccctccatctgaaggctgtgacctctcccccaaggaggaggtgctcgcatgcgtccagtgccctgcccattagattagggagggttcccttttttgctctcttgcactcatttgtccgccttttagctttccttttctgccctgactctcacagggtcgtgcggatgtgcgatgtaggaggaggagagaggtaaagtggaggaataggagctggaggggaggaggagagaagaaaagaggagaaggagggggaagagagggagcgggttcaaggagggaaggaggaggagaaggagaggaggaggagatgagaccaaggagaagaggtgaaggaggagaggaggacacagaaaagagaagaaagaggagaggagacggagaagaggaggaggagtaacaaaggaggaagaagaggaagaggactagaagagcaagtaaggaggaggaggggggagtaggaggagaggagaaggacagaaggggaaggagaggcagatgtggaggagaggaggtggaggacaggaggggatgagaaagaggaggagaaaaggagaggagagggatgaggggggaggaggaagagaaaagaacaggaggagaagaggaggagaaaaggaggaggagtgaaagaaaagaggagaaggagaggagggggggaggacggggaggaagggagaaggagagaaataggaggagggaggaaaggaggagaggacgagaggaggagcagaggaggaggaggagaggaaggggaggagatttggaggaagaggggaggtggaagaagaaaggagaaggcggagaagaggagaaagcagagaggaggaggctgaagaaaggaggaccaggaggagaggacgaggaggaaaggaggaagaggaagagtggaataagaggagcagaggaaaaggaggagggggttggggaggagtggagaggagaggaggaggaacagagttggaggaggtgaaagagaaaagaggagaaggaggagaggaagagagaaggaaatgagaaggagaaaagtaggaagaagaagagagaagaggagaggatgaggaggaggagaggagaaggagagcaggaggtgggaggaggaggagagtaagaggaggaaatgaggaggaagaaaggaggacagaaggtggagaggaggaggagaggaggagaaggaaacgaggaggaggacgaggctgcaccacccttatcaggttccagttctcggtgcgccccgttctgcaagacactctcctgtggtcagccctggtctgcagaggattcccgcgctggatctctgaaggatgctggcgccctctctgcagcacattcctgatgcccttgctgacacgtgtcctctgggccctctcctgaaacctgattctccggggtgtcttctggcctcacctcttctgtccagttccagcaagctcactttgcttagcctttgaatcccttccttcactgtctgc

SEQ ID NO: 42818 - DNA, 1191 bp, Artificial sequence
  DNA replication origin
ccctcacactcacggcgacgagcggctccggccttaaaggggaagccgcgctgccctgcccgcgaccccgccagcccgaagcctggaaactcagggtttccactccgggatggggcagcgggcagccaaagagctgcggccgcccgaggggcctcccgggccctcccaccagtctttagaggagaaagcggccgcaggctggcttcgctgttgcagcctcatttctccagtcggctcgaaccagggcagctggggagggatcggaggggcggaaggggcatcggtgcactcaccttggctgctccgcactcagtggagggtggtctgtgcccccggcgtcagctggcttgcctaggcggtgcgctggtggaaagaggcgacagcagggttagcggagcgcctccagcagacagagcccgccggagggccgcaggcggggcccggcgcgcttgggaaacccgcacgccgaaggtagactttccgcgtctggggaaaacgagctggtgagccgtgcgtggccgggacacacgaagagcgagcacggagagccaaaagccagcggtcatcagtgacagggcgagagagcgctcaggaccgagagaccaagaaagacaggagaccgtacgagacacagagaaggcagagactgagagacagataccgagagaggcaccggcggagatagaggtagagacacgatgaagggagaggagaggagaggagatgagaggagaggagaggagaggaggaaataaggagaggaggagagggaccagagaacaagagagcttgcaagaggaatgacagatccccagaggaccctgaagtgtcacagggacgggagtctcatcacaaagtagcctattcagcccccatcccccttcccattttcaccagagcctgaccctagggctagcggccaggcccttctcctcccctcgccctgggaggggcactcacctgcagtgggtggctgctgggtgggtagcgccagtccctccgcccacgcatccgctcaccagctcgcgccctgactgccaaacagacccgctgtggcggcagcggggaccagggctctcaggtggcagttagtgaactgcattctctccatcccggccgagtgccccactccccacttcccagtcccccacccttagcgcggacgctgtcggcgtcgcccgccagtacgct

SEQ ID NO: 42819 - DNA, 1044 bp, Artificial sequence
  DNA replication origin
cgcccgtcgggcgtctgaaatccggcggggacagccacgtaccggggaggaaaggtagaagggcgcaagctcctcgggctacgctgggctactgggaggctcccactctgtcccagcacccccgggtcgcttgcagcctgggtgtcaccggcgacggtgccttcacatgccagctgcctgagcccaggccagtaggcagtgggcgctggatgaaggatttccccaccccaacgctgtttgccgcctctgagcgagagtgtggagtgtgcgcgccgaatccgctgccctgcactccctcccctgccaactcctgggaagcgcagcccggagctgagctggtgttcagggcagcccggactgggttcctgcggagcagccccggcgcccctgcgtcagagtccgcgcttcaggttccccagcatccgcgcgacgacagagctgggcgcccggcgccggctagcgcgggcgggaagccccccggagcgccgccaaatacttttctcggccagttggcttggccaggctccgtcccaatgcagtgtgtccgaagcctcctggaaagctggagatgtcgtctgattctgatccgtgattaaattcggactgagcagacactaataggattagcctgccagaaagctcggccctgaagccatcggaacctgtgcaaacacgcgcctcgggctggagcattcactcccgccccgccgcgcttctgcagctgggtgcggctgacctgggcacccggagtgtgggtgtgtgtgagcgggcgggagcacagcgtggctgggggacgtggggagaaggggctgcttttgctggggtggcttgtcgttgttgtttggcaccacggtgccccccgggggcgcggtccccacggtgaacgtgctgctcacgggtaggcaaacccaggccggctccgggacattgtctgcaagggcgagcgagccgagcttactagaggcggctgcgctggaacaaaggcgcaaagtctccctgagaccaagcaattttgaaagagttggctagggagagggcctgggt

SEQ ID NO: 42820 - DNA, 1657 bp, Artificial sequence
  DNA replication origin
ccccctccctcccacccccgccgccgccgccgccaacaatccgctttataaaaagcccctttgtttcccaggaggctggagagagggaaggggaaaagggacgcagaggcagagggcgggggcggctgtctccaagtggtttcgagccgctcgggacaggagggcaagtgtaggcgatgggggagggggctgtgtttcgaggaccctctgtgggaacccacgaaggcgcacggagcctcagccccggccctcgctgcacgcccggcctgccagccctggacaccctaaatcctggcggccgggacggccgagtggactgcactgcgagctggcgggcgcgcgcagaggccctaggctgcaagcgctccgcggggtgggcagacgcgactcgccgatgcgctcgccgggctcgggcatagggggcgccctttccttggtttcgctttgcagcgggcgcccctcgccgccggagctcagggcagctgtcgcgcccgccggtggctaagacggaggcggcagctcggaggcttaggccacccgcgtctggctacacgcctcatttcttcccgcgccctcctgccacaccctccgccccaccacacacaagggctcaaactctccgagcgccctttgtttggaggcgcggaggcagtgggagccgccacctccggggttcgtgtagcctaggcgggcagtgaggatgagcgtgctactctggactgcgcgctggcctgctgcctctgcacctaacccagcgcctgacactaaagctgccagctttagttagattgaccatttagcgggtccttgtcccttataactgcccccctaaaactttcgagaaccagggcttgcactgaggaatgtcaaatataatgttagaagtaacctttcgccattctgttggcctgctccgcccctgtgccccaaagtggtcggtgtctctcatagagtttgttcgggaagggaatactgaaaagaaaaaagtgacaaataaggaaagtgggcggggcccaggctcaggctggtgggtctcccaagcgaagtcagattccacccgctctctggccgcctccgcccctcctacttccatttaatctgatgtcgacgttttatttgtgcctttttgcatatctttctcctactcccctcccctcccatctctggaggttattgataagtgctgctcaaacatttgttctctgcgtctttggagtagaagatgaagcgttaacaccctcaacgcgcatacacacatcccaaatgcgcgcatacacacatcccaactgcatctaaaaccacaagaaagtaatcaaagggtaaactactggttctgccttctcctccctcctttgtgcttctcttctggagcaagatcattggaaaataaagctgctgatgtgcgagatggaacatatggtgcctccataagagagaagctgaaatggccttgaacctgccggacagaccagctgtttgctgccagccagagcagctaatcagcttcttccccttaaagtaacagccctcttttcacttcatgaccagtttgcatattaaataggatattctccagaggggaaaagtgatgggctcctatactgctttgtgcttggtggttctccaatgcctgctccctgctctgggggccgccctg

SEQ ID NO: 42821 - DNA, 1629 bp, Artificial sequence
  DNA replication origin
gcccctgaggtctcacacacctccctggggatctggcattttcccctggggctggcctcagagctgggcgggggcagattatggagtgggttgtagagggagcacctccccactagcaatcatggttttttctgcgcctctcatagggaggcctacaggcctccaccttcagctcttcaggagccacaggcagctgagtgacttctgcatcacagtcttctcagagacaaacttgcagtaagaaagaggggcccgtgagggaccccagagaaggctgttgtcaaagcaggatgagagtgaactcttccatgggggacacccagcgtctccaagctcttttatgctgtcttcaaggggtctagagagcttcagcccaacatgagacccagtccagcagcatttccctgcgaagtgaaagttaggaccctgactagatacaccacgctgacctcagccagaatatcaagatgctgaggcgctgagatgctgggatgctaaggtgctaaggtgctggggtgctggggtgctaggatgctgaggttttgtgatactgggtcgctgagatgctgggatactggggtgctgaagtgctggggtactggggtgttgccatgctgaaatgctggggtgttgggatgctgaggtgctgggttgctgggatgctgggatagtccttggatgctgcggtgctgagatgctggtctgctggtctgctggggtgttgggatgctgggattttgggatgctggagtgctgcagtgctgcagtgctgagatgctggagtgctggggtgctggaatactgtagtactggtgtgctggagcgttgagatgctagggcactgggatgctaaggtgctgagatgctgcagtgctggggtgttgggatgccgaggtgttgggatgcttaagtgctggggtgttgggatgctggggtgctggaacactatggtgctggggtgctggagtgttgagatactgtagtggtgggatgcttaagtgctggggtgctgggtgttgggatgcctaggtgctggggtgccgagatgctggagtactagtgtgctgggatgctgaagtgctggggtcctgagatgctgcagtgctagggtgctgagattctgggctgctggagtgttggggtgctgggatgctggagtgctgagatgcttggacaatggggtgctggaatactatggtgctggggtgctggggtattgagatgctagggtactgggatgctgaagtgctgagatcctggagtgctgggctgctgggccacaggctcttgaatccattcgtctgcccaggggaagaaaccagaagataaagagctaatgaaggagctttggttgagagggaggaagtaatggaaggagcaacatcttgtggaggagcaggagagaatggacctcaggttgggagagagggccaggctacaggccagagaggcagaaggattccagcagagtgtgggctccaggagccaaggggaaacaggtttctgggaggagagagtccagtactgctgaagtggcaagtccgctgaggaccaggaagcttcatttggctttatgaccaggaggaatttggaactgtgactagagtacttagggggaaggaggcaaga

SEQ ID NO: 42822 - DNA, 1284 bp, Artificial sequence
  DNA replication origin
ggccaggtcgtgccaggcaggaaaggggcaattggaagggcagacacgggtgctggggaagtggccgaagcccaggccggcttttctgagtccgagtcgtaaagcggagaagactcgcaccagagcaggcggctggacggcggcgatttgcaagaccgggcacagcagcggctctgtagccggctgggaccggcggccgcgcacgtgaccggccgggccaatggagaggcagcgaggtccgcggtcaagggcaccgagtggtgcggagactcgcgcgcggtcggaacaggccgagggcttaggggacctctgccaaccctcgggtgtggaggaaggggcgtgggggctgccgagcgaagcacccgggccctgccccgctactggagcctgcctggcacaaactccagcctgggagggccagagctttccgttggccgctgcgtgggtgggacccgggagggtggtgactgccagtaactcggctggggctccccatcgagccaagtccggagggaacaggacactccctcagaagctggcctgcccaggggaattctgggatgggaacctgctaccctcaggttgccaccggccaaggccctgcatgcgctctcttttgctgacaagccataagctccaaagcccaccctcgcgttgtgctgggggaggggcagcttctgagaaccgcgtctgccctgttccgcatccctagagcccgaaagagtggcgggaggggtagggatggttagtgagggggccccaataccgttcgctatcaatacagggttcatcaaccccacactcaccccatgcccagcataggacctggcagctagcaggtgcttaggaagtgcttgttgctgaagaaacaaatggatgaatgaatgaaatctggcagttgtggctgggggtgaagacttgcttcttgggtgacacttcctaactgtgatgtctccatctgaggagctgtgacaattctccagggcagggccatgcgagaggaagctgttgtcttccgctgccaagcgtagctggggctcaagccaaataacgacagtgcccactttgggaggatgtcataagtttgaacaacgtagtaaaacaaacctcctttttgtcccaaagtccactccttcacacctcgctgccttagagggcctccagctctgcagagccagctgtgcatgcctccgcctttaagaagcctcccgcccccttccaccaaacacgagggacccctccttccccagggttatccccagcacattcactgtgttgtggttc

SEQ ID NO: 42823 - DNA, 1146 bp, Artificial sequence
  DNA replication origin
cacggctggcctggctcggagccgggcactgcggggacccgtggtgaggggatcgggaggaggaagttgggactccttgggccagcgggtcgcgcggggccttgccgcaccgtcagggttgggtgggggtttcgtccaagcgccgtcgctgtccccgcggggcagggctgaggccagggagcagcaggcaggtacctccggcttcctcccgttctccccgcccaaggtggccggccggcggcgggcgaaggtcgggacgggggtaggggttggctggccgtggagctgggggcggacgtctcagccactgcctggactttgcttccccgtcccggggcggtgagtgggccgggcgtccgccctgcctccccggcgacgctccgcggctggtcctcgccttggccctccgcacggagcgggcgtccgtcgcatccccggtgggccctgcggagcggccgcagcccggcactggccgcgaagcctcgatggccgctctcggccagtgtttctgtgtcatacacgagaggtttatctgcttttgcaacagttgagggaagatcttagagggaacggttagttccctgatacgcagtcggaagtatgtacaggcacgagcaagcgcccgtggccgggttgcctcccttaactgtcttttgctgcgctcaggaagtgaaaactaattttagtatttgcctaagcaagtaagaagtgaatctgctgcaaaaattatattagagctttatagacgcacgcatcgtttgaggcgaagtgggttgcgactggttttgaaacagatacaccagatcttcacaagaataaaattatagcattttagaattgactggcatcctgaagtttacattgttcatttgtttcctggatgggggaactgaggcccagagagggtaactaatatgtcccgggcttcagggcaacttaatggcaaagctaatatcacaagccagctctttgggggtatcttggtgtctgtctagtctggattctttttaccacagctcagtattattccttgtgaaataagcaccttagagtcttgagactgagccagcaattttgctagactgcaaaccattttgaatttccttcaaaatcggtttaccaaccaaataagacaatcaggcctgt

SEQ ID NO: 42824 - DNA, 1216 bp, Artificial sequence
  DNA replication origin
aaagaggatgatagtatcagtggtagcaggaatacaagaaggtgttttcaaataaagatacttgggcaaggctgggtgcagtggctcgcgcctgtaatcccagcactttgggaggcggaggtgggcagattacttgaggtcaggagtccgagaccagcctggccaacataatgaaacaatgtctctactaaaaatacaaaaattaactggctgtggtggtacatgtctgtaatcccagctactcgggaagctgaggcgggagaatctcttgaacccaaggaacccaagaggtggaggttgcggtgagccgagatcacgccactgcactccaacctgggcaacagagctgtctcaaaatggacagctctgtccattttgggaggggaggggagggggaggggagggggaggggagggaagggaagggagggaaccgagggaagggagggaacccagggaagggagggaacccagggaagggagggaaggaagggaagagagggaagggagggaaggaagggaagaaagggaagagagggaagggagggaaggaaggaagggaaggaagttgagcagattcacagagcggggggaaggagaatcaaaaatgatgaaaaccaaaaatgtaagacacagaataaccaatggggaactaagactccagaggagaaaggtgtaaagaatgggattcactttggaaaataagatgtctgattccttcctctcagatgcgagggaaggaggaaaaaatgggtgaaggtagacctccttaggtggtgacaaggggacttttcaacagaacaagagatgaggttagccaaagagcatgaaaggtttgtcactgtagtggtggaaggtgtagtgagaagtcaatctgagaccgaaggaattgccaaagcagcgatgagaccctttctgaaagcctgaacttgtagtggaactaattaattaaacctgttatgtgactttcaacatcagagcttagtagcttacagaccctaaagtttggggattagcatggggacaagggacaaaggaaccaagggtactggcaggaattaggtttttgttttgttttgttttgttttgttttttaatgtgaagaaggcattcattttgcagcagcaatataagaagatgatttaagactggaagtttaaaataatacctatagcatagatcctatgctcccactgatgttccgatttatggacaga

SEQ ID NO: 42825 - DNA, 1386 bp, Artificial sequence
  DNA replication origin
ttctgaccacacaaaatatgtatgtgaggccatgcttatgttaagtagcttgattgactcattctacaatgtgtatgtatttcaaaacacgttgcacacgatatatacaatttttgtcaattaaaaaataaattaaagggctgggcatggtggcttatgcctgcaatcccagcactttgggaggcggaggcaggcggatcgcttgagccaaggagtttgagaccagcctgggcaacacagcaagaccctatctctacaaaaaatacaaaaattagctggccatggtagtgtgcagctatagtcctagctactcaggaagttgaggtgggaggactgcttgagctcaggaggtcatggctgcagtgagctatgattgcaccactgcactccagcctgggcaacagcgagaccctgtctcaaatcaatcaatccaatgaataaatgaaaaaataaaaaccccaaatcctgaacagggtgggcaaggccgaggacatctggccaccatctacctctctcacctcatctcttgccattctcccccaactcagccatactgtcatttttcatgcttcctttggtctcaggtcctctcatatgctgttctctcagcttcttctcacctccccagcccctgactcacatctagggaacttatatgtattcttcagaccccaggtcaagcattttctcaggacaatttcccaggctcctcaaactgttgtgcccctgtactactcccacgcaacactgatcacagcttgttattatatattggcgtgactatcagaagaatgtttatcaatcccatgagaactataagcttcgtgagggagaaactgtttgcggtgctcaccatcatatcctagcacctggcatagtgcttaacacatactggactctcagatactcaatgaatacagaatgaaagattggaactggagctagagaattggaaagcaactgacaatggagaaaaaagagggtgaggacagaactctggggaaaataatatttaggaggtaggaaagaaaaaatgagccgcatagaaggcaagaggcagaaatgagaggagagccaggaatgtatagggaaaaggataaaggaaggagcagtcaacagaatcaatccctgcatagaaatttaaaagtcaagaactcaaccaaggccactggaattgagcagtaaagtagtttcaatagggaacagaagccagaccacaagaagtaaggagtcaatagtacggaagtggaagcagcatgtgtggactaatttttaaagaagtttgtgcaataaggggaagaaagaggatgatagtatcagtggtagcaggaatacaagaaggtgttttcaaataaagatacttgggcaaggctgggtgcagtggct

SEQ ID NO: 42826 - DNA, 1678 bp, Artificial sequence
  DNA replication origin
cagcccgggccccgcttacctgtccagggtctccacgctgggctgccgggagccggcggtggcgccccccgcggcccgaggaggcctcctgccgcccgccggccccgggttcgggcccccgccgccctcgcagcccgccgccgccgccgccgccggcctgtccatggcgcgccgagtcctgccgccttggggaagccgccgtcgggacgggagcggcggccgggaaggtttcgctgcttgcctcctgccgcccgctctataccgcccgcccgcctcaggcggccgccgccattagctgtcacctggcggccccgcgttacccacaaggccgcgcgcgcgggggtcggggggcgggagcgggggcggggagggcggcgcgcggggccggcgccgggaacccccacctcgcccagccccacctgggcgctcgcccacggagccttacagcggggatctgggacctcctgctccagcgacctgggtgcgtacagagccactggggttcggaatccccaaacggattatgcgtagcgtgcttcactctatagtcacaccgggttgactgcagagacgtggggtgtaaaaagaagtttgaagacattcaagtatcaaaaatgatttcccacctcagttgtccttcccggaaaaggtatagaacagctcaagctccctcggtcttgacatcttgaagcaggagcaattccgtgcattttagcaattcctccccaccccattcttccctccactctccccctccatacgcaccccgccgccccgccacaaacccacccccttgccatctgtagggcaaccaagtgttctgatgccgccctcggagcttccgcccatggtttatgttaagagtaacatttaacttctgttgattaaaaaatcactgctatgaacatcaagccaatatcttggtgaggcatttaggacatttgctttctgggctagatttatttccttgctcattttgtttgggttcgaatatccaacagctcatcccctctcacctcacccctgattaagttgggagtgggtgtgtggctcgtgattaagcctctttgcctgtgattgctctgggtgtagacaggaggcctgcgacccaggtctggaaaagaagatataaagggaacaatttgctcactgttaaaaggcagatctgcagacagggagttactcatgcccatcccagacccatcctgccccaccagcttaataacttcaaactgaactttgaggatatgatgcctgaagccccgacagccatcttacgcacaagaggaggtgagcctggggtaagaagatgacagagtgaggagggctaggaggaaggaaaggaagatccccagacaataatagctcctatctcacactggagaatcaccgactgcaggttgctggctttctaaaattattaaatcaaatggttaacccactgttatggactgaatgttttcatccccctgaagtccatatgttgaagccctaattccctgtgtgatggtatttggagatggggtctttgagaggcaattaggtcatgagggccaagctctagtctgatggaactggtgctttttaagaagggtcaccagagagcttgatctcatgcactcacatgcacacactgagaaaaggccgtgtgagtacacagcaagaaggtggccatctg

SEQ ID NO: 42827 - DNA, 963 bp, Artificial sequence
  DNA replication origin
caggactcggcgcgccatggacaggccggcggcggcggcggcggcgggctgcgagggcggcgggggcccgaacccggggccggcgggcggcaggaggcctcctcgggccgcggggggcgccaccgccggctcccggcagcccagcgtggagaccctggacaggtaagcggggcccgggctgccccggcctcccgcgccccgactcccgagggccccgcgcgaggccagcccgccccctccccgcgcgctgcgcagggcctggcggtggcggggtgggcggcccctcttcatcccctctgggccctcctcccccccacccccggaaacctcagcgccccatccggggactgctgccctcggacctgctgcgggccgcgcacctggctcacttccgccccgagagccccagctcctggaaccccgggaggggcttcgcagctgtcaaaccacttccggcgccgccacctgctgcccttggcgatcgcttggctgtccctgcccaggccaccaatcctcttgggagggagatcccacccgggctctcctcttctagcatcaccttgcctcgtgtggttttaagaccccaattctgctgtggctgcttagggtctttgatggggggttgggagtgaggacggggagatgggaccccgcgggcgtgggagctggtgcagatcgaggcaaaaatctgagatggaaaacgtccaaactgctcaggaggcaagaaaacagaaccatttactttcagttcttcacactttgagggaaccagtttattgttttcatgaacacacaagcaagcctactgcttctgaggcagctgcagaactaagagaaatcagttagaaacataaagtgaccgtgtcgaactgggaggggccaccgcctcctccgacgacaagagatggcctatcgtgtaacccggaacatccagttttcccacaacttggccatttccctgac

SEQ ID NO: 42828 - DNA, 778 bp, Artificial sequence
  DNA replication origin
tcttgcagagcacaaagtctaaagggagagataaatgtaatttttttttttttttttgagacggagtctcactctgtcgcccaggctggaatgcagtggtgcaatctcatctcagctcactacaacctccgcctcccaggttcaagcgattcttctgcctcggcctcctgagtagctgggattataggcgtgcaccaccacacctggctaatttttgtatttttagtagagacagggttttgccatgttggtcaggctggtctcaaacttctgcctcgtgatctgcccacctcggcctcccaaagtgctaggattacaggcgtaagttactgtgcccggccagaaatgtaaatttttttaaaaagaggaagaaggaagctaagttgatgccaggagctcaggtggtggccaagtggcagagggcgtggggagctggagccatcgggcagccacagaaggtgatgtctgggctgttaggcaggagcaaaaggcctctctggaggaaggtggagcgtggacacaaggcagactgaggcggggagagtaggtagaaagctgtcccaatatcccagaggactgggtgtggaggggagacctgagggagaggccagtggggacaggacaggtttagggtgggcaggtgtgagtcctctgtaggctgaggggcaagagccaccacagggagaaggaataaatgcaggttcaaggggctggagagagcagatgtgcagggggaactggcctgcagcagaggggcgcacctcttcattcactcatg

SEQ ID NO: 42829 - DNA, 890 bp, Artificial sequence
  DNA replication origin
aggctgaggcaggtggactgcttgagcccaggagttcaaggccagcctggcaacattgtgaaatcccatctctacaaaaaatacaaaaaattagccaggtgtggtggcgtgcacctgtggttccagctacttgagaggctgagatagaaagattgcttgagcccaggtggaggctgcagtgagccgtgaccacaccactgtactccagcataggcgacagaatgagaccccgtcaaaaaaaaagaagaagaagaaggagaagaaggagaaggagaagaaggaggagaaggaggacagaacacaggaagggagggagggagggaggaaaggaaggaaggaagggagggagggagggaggaaaggaaggaaggaaggaagggagggagggagggagggagggaggaaaggaaggaaggaaggaaggaaggaaggaaggaaggaagggagggagggagggagggagggtgggagaacaaagggagggaagaagggaaggaagggaaaggggagaaaggaaaggaaaagggaaaggaaaggaggaaggaaggaagaaagcaagcccagatataaacccttgcatatacggtcactagattctcaacagtatgtcaagaccattcgatcggggaaaggacagtcttttcaacaaatggtgctgggaaaattggatagccacatgcaaaggaatgacttcggaccctgacctatactacatacaaaaattaactcaaaatagatagaagattcttagacatggtggcatgaaaaaaagaaatagttcaaagacctaaatataaaagctaaaactataaaactctcaggagaaaatattatgaaaaagtttcatgatactggatttgatgatgatttcctggatatgatacaaaagc

SEQ ID NO: 42830 - DNA, 1018 bp, Artificial sequence
  DNA replication origin
tcgctttctccttggccaccctggtccagcgaggtaaggcgggcggggggcgcgcggggaccgcgcggggaccccgccttgtgggcccaggggtcgctctgcgcatgagcggcacggtccccgcctctcgggcctgcggtggctgccaccggccggcccggctgtgcgaggcggagcggcgggggtccgagccccgggcccgtgggggttgactccgccgcggtcggagtagccggagaggaggggtgggtcccctcctgacgctgggctggaaacagcgggatgggccccctaaaatcctgaacgagcaggtgtaccactggtgacaacagctgtccccaagagtttacctttgagaaaaccttgaagagagcagtcattttcgaaatttgctgcgaggccaccgacagcagaagcacctggggaacttcctaggtggattcctagcccctttcatcgggatcacagcgggcatgggctgtggggggggggggggggggtcagcgaggcgtaggtctaaccagctctctaggtgcttctgccgtccgcttcagtttttgagactttggtcatgttttgccaaggagcaggagagagaaatcccgctgaatcaaggaagcacgtttcttagaccctctgctactcaaaatgtggtccagggcccagccgcataggcatcacctgggagcttgtaagaactgcagcatctcacgccccgcccccgacctactgagtctgattctgcatttcaactagatccgcgggtgattctctggcacattcaagtttgagaagcatcttagtagaataaatgcagtctgtggttaaaaatagggtcttaaacatgtaccaacagaatcttcttacacttatttatatcctatgtccccatcagaaaaagggattaagggaaacactgtaattgaacgtgaattatgctccaagcttcctgacaatagaagcgaacccagctggtggaaaatatgtgagctcaggaaacacacacacacacacacac

SEQ ID NO: 42831 - DNA, 2211 bp, Artificial sequence
  DNA replication origin
cccgcgcgccccccgcccgccttacctcgctggaccagggtggccaaggagaaagcgaggcagacaaggaacgccgagcgccaggccaccatggctgggagcaggcggagggccccggaggagcacagttagcgcgagagcgcccgaaggggaggccgaggaggagcgggaggaggagccccgccgcctctgcagggtcccgcccaaagcccgcgcgcgcgcgcggcgcggccccgggaagatggaggtcgggcgcgctagagagccggcgcctgagggcgcctgggctggggttaggccggggggcggggcgaggctgcagtatcgggggcggggccgcgttctggaggcggggctccgggcgaggggcgtggcctgcgggcacccggtgggtggggaggcctgggttgggttgggctgggtccagcggcagcgcgcggtccgcagaccctgtcccacctcggtcctcgagaccgaagtctcggaggtggccccgcggacctggagcagtgagtcaccagtgccggggagcgggaggcggcagcgccggtgggcgccgatttcctcccgggtgaccttgagaagggctcttccccttctggccttggtgttctcccggtgaagggttgttcccttggggcccctccagacaccgtccagcacggagccccgcactctgtccccacccgctgttccctgcaggagtgaaaccctggccggagactgaagaaaaggaccgttttcgtgactggctgcggtcaacaagcagtgacacgtctcgagaaaacgaggccgggggcgcccgggtgggcgacaggggaggatgggggcgtcccggagccgaagcgccgcgggctcgggagactgggggtagggactgggtcagctctcccgaggctttgatgaatgcgctgaaagtgcaagttcatatctgcagagtcgatctcaaaaacgtgcttaatgaccgacaaacgcgctgcagtcctttcccatgaacccccgcaaacggagtccgtctcccagacccgaagaaatcagattccgatacgatactgtgccgaccagcaaaatgcccgctgcagcagttgatgggaacgctccctagaagagccccagctgcaaccggctctcgaagacaaagaggaagcgctactgctctccggagtggtagcgtgagcctgtccctgccattatgcggcaccggctgcccagggccacatcctccttagagggcggctactaccacctcccctcaatatccattcggcagctttcctgtgcccccaacccagccctcgctgccataggcacccccctcagtggctcccaccaacccctaaggaacagtggggtgtggggtctccctgagatggagccgaaatctcccgtgtggcttacatccattgccctgaatcttagggctgcagaaacaaaacagcatatgaggagtggatcttcccaggctcagggcattaattactctatgaatggaacattattccattctagctgtagaattaacagaaatagctggtagttattgaacacacactatacacatggcatattccaggcattttacccttaatttttattcctcacaatgccttatgtatcatcacctattaacgagggaaaagcagcaaaatggaggttccttgaggttggggagttagccaggtctagtctcatgtgtcaaagggggagggtaccactaggaaccccagctggtgaatggctaagaatgtgtgctgtagagccagaccgggtacaaatcctggctaaacccaacaaggttgtgctaaggattaaatgaggtggtgaaaagtggacagcctgcacacagtgacagagggcagggaccattactggttaatctagtaacggctaaggaaatagtggccactgtgaggtcaggaggttactgtctattccaggctgtggacatgcccccacctttgctactaagtgccctgagccattccataggccctggtggtaccatctgtacctggagggcagtagattttctggtctttaggagtcttccaggatctgatgggtaaaccctgatgcatacacactcatctacactgaggaggtgagaagcatgtaacctcttaagtttgaggccatgtcaatcaatatgcagtggacagtcacactcaactggaactctagctgctaaaggtgctacaatgccatatgcaa

SEQ ID NO: 42832 - DNA, 1102 bp, Artificial sequence
  DNA replication origin
accttggcctgctccctctgtctagcccaggcaaagggagtggcaaggagaaatttgtgccttttctgagcaatgagcagagcactgtgtgtgtggccatagtgtcaggaaagggtcgcaagtgacatgagatgaggagagagccctgggctttgtttccacgctaccccccgcccccgggagagtgaggagtttggactgggtcagtgcttctcagactgtggctcacagacacccagaggctgctgctgactacaggggaggcttgggcagatcctggagaagtaaggaatctggatcagtaccgggccctgtggggactggagctatgaagactgtgaactggagtgagcagatcaaattcgcatttgatttagcggctctagtgatcaagtgagtgttcaatggggaggtgggagcagacagaggagggaaaagactggaggcagagactcgttaggaggaggctgttgcgggaggccagggagggggaatgggtgtaggaactatggcaggggcagaagaggaaacaagccacaggatggccaaggtcagggaacacctctccatgctgtggcacttagagaccagctgtctgaagtcaggttggagaggcctcaggcagagactgagagagactgggagagagctgctgggggagggggaaggcagagggagctgaagggaggggttttttgatgtggaggtgacagtgggatctcaaagagaagcctctgcaccgggtagataaaggtccagaattcagaagaggcactgtacgggggaaaactcatcaaggtcagaagcagggagctctccaagtggcagagaatgtggggcccctggaggagacctgggtattagacagttgaggtggtgggagtgtggggcagaaaaaggagggccagggcaggaggcaaagggaagagggggaaggaaggaggggagacaagcaagagcatgtcctgaacagcggctcaccctggcagagtaggatccacggctggtcctggccagtgacctgctgggattgctggattgactgttggctgtaagctccagcaaatgctggaatcacctgggagatcatccagcatctcca

SEQ ID NO: 42833 - DNA, 861 bp, Artificial sequence
  DNA replication origin
agacggagtttcaccatgttggccaggctggtctcgaactcctgacctcaggtgatccacccacctcggcctcctaaagtgttgggattacagacgtgagccacggcgcccgaccgggaccgggaccgggcgtctgcatttcaccagatggctgcgcccgttgcccctcccgaattccctcaccccctccccaccagaccccggaggctgccggggacggtgggaaaggagccaccggggcggctccctcccacagcactgctcttgcccagggctgggacaaggaagagaaaggagcgcagaagccagggctgttcagcacgacacaggcctcttcagcagcaccagcgccaccgcgtccctgctctgggttcctttcatattgaatgaaaagcgggaagtgggtcagtgaccaaaggatttcctactttttactctccacgccggcgccttgtgggaatacaatcctaatctacaaaagcccatcaagggccagtgacgtgccaggccggccgggtcctgtggggaagatggagatgaaactgaagggcccttgaccttctaggcaccggtctccttcagaggaggggaagggagcagaagagaggggactctccaatgggatagctcccaccagccaccacattaccgaacagccctgccttgtcccgccttgaagtcttcaccatgctgctgggttacccattctagattctcacctccaagccccatcccatccagaaggcctgcacacgcagcagactgtagtccccaccctccacccacaccaagtttccgtctggctagtgactgaggcccttctgtgtctaccccgtgtaatgtgtaatgtaaaggtacaag

SEQ ID NO: 42834 - DNA, 1812 bp, Artificial sequence
  DNA replication origin
attgcttcttccttcccggccgcctagcaggagggaaggcggagggggcgggaagggaatggggagtagaggcagggggaggcggcggcagggcgcgctcacggcggcgcgggccggaaagttgtgcgggcgctgcggcggcggcggcggcggcggcggcggcggcggcggcggcggcggcggcggcgggagcgggcggtgcgagacgtacctgtattgttcgctagtctgggcagcgcagggcacgacgcgcggctcagcgctccccagcctcgcgctagctgcctccacgagagccgcctgattggccagcgggctctgccgtttaaaacagcctcctcgcctggccattggctgcgggcctcatgcatattaagcaggcgtggacgcccattgggcgcggctgctgggatcattcattcaaacagaacgacccgccggcgccggctacggaggccaaacagggaaagacctagtctcgcctgcccgccccgcccacctcgccagccccctcggggaacagaactgggatcgccaagggctttgaagaggtggccctgcgattcccggaggcctcggcctctggcgtgggaagatgaagtccagccccgctgcgctgccctctgctcccaccgcaccgcggccttggcgcccctggcctgcagtcagctcccctgcccggggaaacacccctgggcccaccacgaagggccgatggtagaccacctctacccggttcggccgcggcgccgcgacagaaacgcggcggcagctcgctcctcgatgcctggcggagggcagctgcttgctcgccaagacctcgggatttagtcctcggatctcgctgcctatccgaaagccacctgattccgcttctgcggatcgtgctcaactaggctctttccactaaatgccagaaggtctttatttgcgcccgaaattgcggaaccgacgggctaaaagaggaaaacaaaatttggcaagagcagagaatttgtgagaaattgtagttttgtgggcaaagaataacacttttcttcttaccctcttcactgtctcggttcaaggccctcattccctctgctctcctgacacaccctagagcaaagaattaaagcttcgggaatgaatgagtgaatgaatgaatgaatgggatttgacttgatctccactttgccattggctggtggtatggccttgagctagtcacttctttggggattcaggcaatgtttttcaaagtataggagccgcagtgtcacttctgtaagggatgttctgaaattcgtggggccggtgcctggatgactggcaggtgttgctggaattcaataagaggaaggaacggccggggatactaaatatcctacattgcataggacagtcccacgcaaggaagaaatactccacttcaaatgcaagtatcagccctatttggaaagaaagtatctgagggcccttgcctggaaagaatgaaagggtgagaaaaagagcagtttaaagattgacagttggagaaaataatgcaaaggaagagatgtcatgagtttggtttttcttttctttgaaaggccaagagatccagctatttatgagtcctatattcagaaataagccccaccagaacatgaattttccaaatgctgcttccagaaaccgtggctgagtttgaggtgtgcaaaggatctggcttcacagggcacctgcttcttcacccctacgccccctcttaccaactcctctgagcctcccagccaagcctgagcccctgaagctggtgctgttggctcccatcatcaaggttccaatcca

SEQ ID NO: 42835 - DNA, 1066 bp, Artificial sequence
  DNA replication origin
ggtccggcccgggcccccgagcccccgggcggcccgggcggggcggggcggggcggggtgggggccgacgggcgggcggcggcggcggggcccgggccgctttgttcgccgctgtcgccgccgcccgcgccggccgcgcgcggatcagccattttagcgagtgggactccgaggcgcggcggacgccgccaccagtgccgcggctgccgccggcccggccgcacaccccccgcgcaccgccaccgccgccgcccccggccccgcgcgtcccccggggatgacagcggcggatttcaggggcactttctttcatcaggaggcttttgacaaaatggaaggtgaattacgggtgtcccggtgacccggcacgggggccgaggcgggctgcctgctgccggccgggactcccccgctcccggtcccgccccgcccgggccgccgctgcgggtctctgttgggcagcctcctgggcggctgctgccaaggggagctctttagttttacatgatgaccttgggtgtgggaaaaggaaaagatggcgggaagctggggggtgggacagggacgatgacatgccgcagctgcatttttatttggaaactttggagaaagtgttctcggctggacctgcattctgggttacagatgagcacgactagccctttttatacaccctccccctttagatagtgacgaagtgatgaattgaactaatagtacgggggtacctgctcactttccagatctcccgtgttgtaaagccgtttttttagtaagccaaaacacatcaacaatagtgacaatttcagatgtcccctacgtatagttctcctgctttggtcttgtgttcagcagtggtaagagttgttgtttttaattgtgttaacagttagcagatgaccagatagtcttaagtcatagatttcaagcttctatcacccccaccaaatgtgtcctctctctacccttcccactttgtgattgtagtttccaaaacatagcagttctgtaaacgtaacactgagtaccctacttgggtcggctccatttggagcacttgatcgct

SEQ ID NO: 42836 - DNA, 1359 bp, Artificial sequence
  DNA replication origin
tgtgcccgacccgccgcttgcctctctctgccgttcgccctgggacgggcggacggagctcggctccggcgggctcagacctccctgctcgattctcgggcgcgggggtctgtgctccgccgcccgggatctgcccgggagccgtcctggagccccagggccgcggcgagcgggctcttggcccggctagggagaggccactgcgttgcgctctggtaagggccgccgcggccgccgcgaacttaactttcacagagcaggtcgcagccccgctgctccctccgcgtcagttcggtccgcgctgcctcagcgcggccgcccttgcggcgtccggctcggcttgctgtccccgggcgaatcgcctgactctcccgctcgggtgccggctccctccgcatcaggccccgacgggacagggatcctcgggctgccgcgcaccacgggaacgctttgtacttggatgcccaaagctaattctctgtgctctctcggccttgagaacctccacgtttagagggccgggacagaatactaccacccccaggcttgcggggaatttgggagcagggatgttcaatatgagggcactgtccatagattctctattcggggagctcaaaaactaacgccctaggggttgcaagtctctgcacactgggtagggagaagaaggggtggcttaccagaattccggagcttcttgttcttcgtcacagccaaaatgaccatggagttgccgattaggtctacaacgatggtgataaccatcgcgcagaacataaagatgattagagccggtgggtattctggctggggtagcttacagccaatacagccatagggggtgggaaccgctagggtgggccccatgttgctcctggggatcgttaagatctcccagcaggctcaggatcagcagccaggtccagacagcaaacacctgttctgtcaccaggagctccaggaaagcgtgcctccctctctgagagtcagagagcaaatgacagcatcccgcccctctccgatgagcttttaaagcctcaagaggcggctagccccaccccaaatccctccccccgaccaatcagacctccctgaataccccccccttggctaccccctcttattggacaaatccacattgaggtgtcatcttgcttccgactgccttgtatgtacttcctctctagccagcctgccctgcctctcaatctcccaggtaccttgcaagcatcatgactagctcggagtccaccccacaccccctccaccagcccctgtgcattcgtttctagcaagttcttctccctctctcctccagtgcaaacacctggcaaagagatgtagattgcagagccg

SEQ ID NO: 42837 - DNA, 1582 bp, Artificial sequence
  DNA replication origin
attagctttgggcatccaagtacaaagcgttcccgtggtgcgcggcagcccgaggatccctgtcccgtcggggcctgatgcggagggagccggcacccgagcgggagagtcaggcgattcgcccggggacagcaagccgagccggacgccgcaagggcggccgcgctgaggcagcgcggaccgaactgacgcggagggagcagcggggctgcgacctgctctgtgaaagttaagttcgcggcggccgcggcggcccttaccagagcgcaacgcagtggcctctccctagccgggccaagagcccgctcgccgcggccctggggctccaggacggctcccgggcagatcccgggcggcggagcacagacccccgcgcccgagaatcgagcagggaggtctgagcccgccggagccgagctccgtccgcccgtcccagggcgaacggcagagagaggcaagcggcgggtcgggcacagcaggcggtggcagcgacggcggcggcagcggagatcccaaggtccgtaagcggggaactggggggtcgcagggcgggccggccaagaggcttgggagctgggcgttgctgggggtggagggatagaaggcagcaaaaccgagtagggattggcgggagggcgacgggagagctcagaggcggcgatgggggactcagagaggctgcaaagggctggggtctgggagccgcaggcgggacttcccccgctgctagccactgccgagcgggaggaggccgggggccgggggccggcggcgagcagggcaggagggaagcgtgggaggatgccgggcgctgcgacctgtgctgggggtgggggcggcagacactgcagagcagctagtccggcttacaggttgggcgggagagggctctggaagggaggggaaggggcaaaggcgcccaaactccgagttcaggccgggggagggaggggcggcgcctggaatttccaccgccagattctcgatcggctggggctaggagtggggaccgaagggggtctgagagggtggggagaccagctggattctcccgggcagggcgtgggggagaggtggcggccggggtctgggggattactttgcttgggcaaggagtcacgaacactgaacaagtttaaaaacgcactgactggcacacagtcattaaaagttttcttacaaagtctggtgggtgtctccgatttctccttcgtctcctggaatcgtggggccatacactaggtcttcaccttcacccccgcggtgcggtcccgaggtgcaaacccacggaatcctgggggcgacctgcgaagcccattttattccctttagatttcttttctttctttttctccttctccttccttccttctataattcaaataaaggcttttatggttgttgtggttttgtttttaaggctttgccccttctcttttcggctgtatttccctgaattcattactctgccggaaaaccatagaaagaacctcttcggtagaaagtgctgaggccgagtgctgacagcgctggaggaaggaggaagaaggagccatacctttgcccttttcaaaagcgctca

SEQ ID NO: 42838 - DNA, 1099 bp, Artificial sequence
  DNA replication origin
gggccaaagataggacatgggcgtagcacaagaaatcactggcaggacaaggggtttggtggcccagcagtgctactggcaaaggacattgggtattaactttgtcttgggagagaggtaggagcagagggaaaggagaaaagaaagaaccagtggctcagatatctcttagtctgtaagagaaggagaaaggaaggaggaaccaagggaaggcaaacaaagaggctgaattttaagtttcagtcgggtagaaaaataactcaaccagaaaatgggttagggaggacagagaggtgtttggaagtgcactgggctgaagacagtggacaagaaggcaggaactttccctggtcaagaagagagcattttgcaagaatccactgaggaggaaagggttgggtggagggggtggcagagattgggaggagggtgtccagggtccagtgaagggaaaagagccaagagaatgagctcagcagacccagcctggatagaatcagaatacgggaggtgggaggtcgcccccagcgaaagagctggagcagagggagggggagggggaggggagtgcagagagttcaaagacagcctccaaggactcattcaaatgacacaaacacaaatcacaacttagcgtaggaatatgtacaacaagtgggctaagaatgcaggaggccagagaggtagccgctggggccctgggagaagagaaaagagatgtctcttcagtgtaagacaaggctgaatacaaagcggacggtgtattgtgggggaggccaagagggccgggggctcttcacaaggggaagcagggagcagagccagaagggggaagctggatttctcacgcagtttgcattttctaggacctgtgagatgtgggtttcaaggtatacaattgtgaaggtgaattagggagggagaaagcagcattgtgacgatgaaaagcaagagaagcatgaaaggggaacattatttgagcaagccgcacattttccccaaatgaggaagaatttaggactggaaggggactcccactgtatctatgctgcagagatagggttgaaagcaactggagagtgatccatcatagccagga

SEQ ID NO: 42839 - DNA, 1392 bp, Artificial sequence
  DNA replication origin
gcggtccaggccccgctcagggctacctgaactcaggaggctgcagtgcgttcagcgccgccttatccgggcgctccatggtgtagccgtgccggcacaggcgctcggcggcggagctgggctcggcggccgcgctcagtaagctccgcgagggaacggccgaggcggttcgcaccggaagtagcggttcgcgccggaagtgcccgttcgcgccggaagtgcccgttcgcgccgggcggcgggccacagtacgcaggcgcggcgcggcgcggcgcgccgcagcgacgcagggctgttgccggcgcgggggcgggcgctcacatgacttaccggcggtggctccgcggcgtgcgccctgccaggaggggcctgtgctcgaggagcaggcctggcgagtagcccagccactccacgttgagccgggacttgccgcgcaacatggtcctcctgggcgggcggcggctacgccgccccctgaactcgcgtgaacactggtcctcgtctgcgtctcggtcgctgagctgggggccgcaaggagacccgagcatatgagccgcgaagagggactaccagccagagggctgtggtgctaggcaactgagcgtattccgccgacgacaacacaaaaaagcagtgcgcattatttcgccactacttgagcaaataaatgcctcattaattactgcccgcagtggtaggaagtcaagcccttggcagctgggaggagttaaaacactcacccgagtccgtaaaactagagaatgtcagagttcaaagagctcttgctgagaatgactgttccagactcgatgccagtgacccccaacttccacttaaaagttaaaaacatattttgcagctgctcagaaagccgccaatgagacaacagggactcaaatagtaagaacagatgggcctcccgggcctgcgcaacccgagagaggtaaaaacgaaagggtgggtaagtctggagtcaggcttgacaaaattaagttgccactggctgctaataagaggacagcccttaacatggtcagcgcctggaaagggccgctgaccacacagctattttctgcaccacatggatacaaagaccacatctgaaatcatgactaaaccagcagcttagagtggtggaaagggcaatggactgggcagcaggaagtccaggttttagttcaaactgaataatccccctctagggctgactgtgctggctcacgcctgtaatctcaacactttgggaagctgaggcaggaggattgcgtgaggccagtagttccagagcagcttgggcagcatagcaagactccgtctctaaaaaacaaactgtaaaatatttaataaaaataatagtaatctctatctgggcctcatctagacctttaggtg

SEQ ID NO: 42840 - DNA, 1147 bp, Artificial sequence
  DNA replication origin
tcaacgtggagtggctgggctactcgccaggcctgctcctcgagcacaggcccctcctggcagggcgcacgccgcggagccaccgccggtaagtcatgtgagcgcccgcccccgcgccggcaacagccctgcgtcgctgcggcgcgccgcgccgcgccgcgcctgcgtactgtggcccgccgcccggcgcgaacgggcacttccggcgcgaacgggcacttccggcgcgaaccgctacttccggtgcgaaccgcctcggccgttccctcgcggagcttactgagcgcggccgccgagcccagctccgccgccgagcgcctgtgccggcacggctacaccatggagcgcccggataaggcggcgctgaacgcactgcagcctcctgagttcaggtagccctgagcggggcctggaccgcgaggcggactggccccagcctggagcagggcttgagggaaggccctagctgaatgggtgggcgtgaggtctggaccccggggacctggcctcagggaagggggcggggaaagcaggttggagcctgagacgtctaaactcccggccccgaactttcgctcgggaacaagggatccggggtcatggggaataggtcagtgggccttcagctcatgctcctatcctagcactttctctcgctgtgtctatattgcagtctctttcattaccgcagggtcagccttctgaggacaggaatgcagtctccttcatctccgtgttccctagggggcctgcatagtcggggcttaataaatgtttgctgtatgaatgaaggagtagaagggaatagtcccctggtgtgagattgcttcacttggggaatcagtaagatagaggctggtgactgagttgaaggaatgtatgagagagcaggtggttctggcccaccccagtaggcaagggagtggtgagggagttagctatcattcgttaagacctactgtatgccaggctcagtgcacgtgctttacatacattgtcagaattcttaatttctctaactgcttgatttcccaattttgaagaggatgcagttgagggtaagtgacttgaaactgagggtgagtgattacagaattaggcgacaaagttagtatgtaattgaagctaacgtttgaccaagctcact

SEQ ID NO: 42841 - DNA, 2141 bp, Artificial sequence
  DNA replication origin
aatggcttaggatgcatttcaagggtgagcctgttgatgcctgagtgtttcccatctgaaagacaaaaccgcccgcagttttggtttgtttctccccctgcccaagaacctgcaacgttccctggaccctgctgatcggaatagttgtgctcactgatgcagcagcagaaacactagttttcctcccagaccacatggaggaccgaagaaggtcggatttagtggccctcactgacgcattctcgaaaacctgcacccttgcctgtcctcctagaccacaaggaggaccgacgaagaaaaatcagatttagtggcccttaccgatgcattctcgaaaatctgttagagtcctaagcattctcctgttagtactgggattttacccctgtcctataaaggtgttatgccccaaaaatgaagtggagggccatgccctgagggagggaagggatctccacggttggaagagtgacaccttttgtcctcacttatatgaacgggaaggatacaatttctgaggctccccatatcctagcttcaggaatagcttttgttaggcctattagtctgaggagaggagggatcataaaattccaggtagtccccactatgacggggctttgggcaaaagttatgtctttctgattggtgagcctgggttcctaaagaaggtaacagtcctggagtttatactagaaatcatacttataggagaaactagaaaagcaccagagacaggtaacaatttttagaagcgggactaacctcggagaagagaggcgagaggaagtttgtctggcaggcattaggacccagggggcaaaggtcaggatagataggatagatgggcgagtctcgcttgggcaacatgcctttgagagttccgctcatggccgcagggtcaaccaacttgtcgttgggaccctggagctgcatgggtttcctctctgtcgaccctcggctcagcccagaagtacaggaaaagtggaagctggttctaggcaaaccaacgctcctaactccgaagagtcgggggttgttagagagccctttcccagaaagcctgacacctgtgtctgtagtccggtggccgcgctagtcgcttttaactggccgacaggcgcccggtatttagcctccgaattctaaggaaaaataggacagaatagcaagcgaaaggggtccgatggtactcactgcttggcgataggcgataatctctccgctcagtgataggcgatggtctcaccacttggcgatagtctcactgcttggcgataggcgatggtcccttcgtggtcaccaaaatgtgtccagaattggtgggttcttggtctcactgacttcaagaatgaagccgcagacccttatggtgagtgttatatttcttaaaggcggcgtgtccggagtttgttccttctgatgttcagatgtgttcggagtttcttccttctggtgggttcgtggtcttgctggctcaggagtgaagctgcagacctccacggtgagtgttacagctcttaaggcagtgcgtctggagtttgttcctcctggtgggtttgtggtctcactggcttcaggagtgaagctgcagaccttcgtggtgagtgttacagctcataaaggcagtgtggacccaaagagtgagcagcagcaagctttattgcaaagagagaaagaacaaagcttccacagtgtggaaggggacccgggcggattgccactgctggctcaggcagcctgcttttattcccttatctggccccactcacatcctactgattggtccattttacagagagccgattggtccattttgacagggtgctgattggtgcgtttacaatccctgagctagacacagagtgctgattggggtatttacaaaccttgagctagatacagagtacggattggtgcatttacaatctcagctagacataaaggttctccaagtccccaccagattaactagatacagagtgccgattggtgcattcacaaatcctgagctagacacagggtgctgattggtgtgttcacaaaccttgagctagatacagagtgctgattggtgtatttacaatcccttagctagacataaagattctccaagtccccaccagactcaggagcccagc

SEQ ID NO: 42842 - DNA, 988 bp, Artificial sequence
  DNA replication origin
atggagacgcgccccagacctgccggacagagcctggcgttctcacccgaaccgcccgctcagaccggcctattcgcgacaccgcaagctttccattcttcccaactctgcttcaatttctcgaaatgtccaaagaaaaatcaatgggtgcctcctatggtgcacctacgatggtgcccaatgcaggaggaggttcagaatgtgggggtcttcctcgtgtaacccccagctacccgctgccacccctctccttctgcctcatcccaaccaaccttcccaggatgaccaggaaaacgagggtcctgcagggaatgtctctgatggagtagcttgggctcctcagccaccgagggacaaaggggctggctccccgccgccaccccaaggcattttactttgcagtagctttcattaacggacttcactcacccttgtggaactcttcactgctggaggccgcagggacttggggtaccttgaagctcctccctgtggtctccggtgagagcccgggagcctggtgggcgcccggaaagtctggaaatgaggagcagcttctagactcttcagggaagtgcgtgggccccagagtgcaaagcgcgtggtgggggcgtggcagagaggggaggcaggcatggaggcagcgtggcagcggaagtaggggggaggagtggtagcatttttccctagacctcgcgatgttggggcccgagataactactgtctctggaactaggagtgcagataagccacttcaacgtagcccttagcttgtcgagtcaaagggttccaccccaatacaggctctccaccctccctggacccctgagcactacctaagcaggacctaatggagcccagaaaatgtatggatcccagaaaagaggggtctttttgagtccaatcatggctctattgtggaactgagaggtgacagcgagctggcaaccctcgcagccgtccctcgcactccgcacctcctcggcct

SEQ ID NO: 42843 - DNA, 1022 bp, Artificial sequence
  DNA replication origin
ctaagggctacgttgaagtggcttatctgcactcctagttccagagacagtagttatctcgggccccaacatcgcgaggtctagggaaaaatgctaccactcctcccccctacttccgctgccacgctgcctccatgcctgcctcccctctctgccacgcccccaccacgcgctttgcactctggggcccacgcacttccctgaagagtctagaagctgctcctcatttccagactttccgggcgcccaccaggctcccgggctctcaccggagaccacagggaggagcttcaaggtaccccaagtccctgcggcctccagcagtgaagagttccacaagggtgagtgaagtccgttaatgaaagctactgcaaagtaaaatgccttggggtggcggcggggagccagcccctttgtccctcggtggctgaggagcccaagctactccatcagagacattccctgcaggaccctcgttttcctggtcatcctgggaaggttggttgggatgaggcagaaggagaggggtggcagcgggtagctgggggttacacgaggaagacccccacattctgaacctcctcctgcattgggcaccatcgtaggtgcaccataggaggcacccattgatttttctttggacatttcgagaaattgaagcagagttgggaagaatggaaagcttgcggtgtcgcgaataggccggtctgagcgggcggttcgggtgagaacgccaggctctgtccggcaggtctggggcgcgtctccattaccacagtcggggacggtgtgctggggtgggcgcgtatatcgagaggtttgcctggttttcagcagattgagcagtttgtacacgtgaaatctcagacttcagaattttcagggcagtagcggcttttcaaaggatctgcttgaagtttttgttgtcctttgggtttgttttttgcttttttggatttcaaatgatgaggagtttatgtcaggatgtgtatttgggcacacttacacggagagcacagaag

SEQ ID NO: 42844 - DNA, 1205 bp, Artificial sequence
  DNA replication origin
agaatttttcttagtacagaacaaaatggagtctcctatgtctacttctttctacacagacacagtaacaatctgatctctctttcttttccccacatttcccccttttctattcgacaaaaccgccatcgtcatcatggcccgttctcaatgagctgttgggtacacctcccagatggggcagcggccgggcagagggactcctcacttcccagacggggcggcagggcagaggcgccccccacctcccggacggggcggctggccgggcgggggctgcccgccacctcccggactgggcggctgccgggcggagacgctcctcacttcccagacggggcggctgccgggtggaggggctcctcacttctcagacggggcggccggtcagagacgctcctcacctcccagacggggtggcggcggggcagagacactcctcagttcccagatggggtcgcggccgggcagaggcgctcctcacatctcagacggggcagacgggcagaggcgctccccacatcccagacaatgggcggccgggcagagacgctcctcacctcctagatgggatgacggctgggaagaggcgctcctcacttcccagactgggcggccgggcagagggcctcctcacatcccagacgatgggcagccaggcagagacgctcctcacttcctagacggggtggcggccgggcagaggctgcaatcttggcactttgggaggccaaggcaggcggctgggaggtggaggttgtagcgagccgagatcacgccactgcacaccagcctgggcaacattgagcactgagtgagcgagactctgtttgcaatcccggcacctcgggacgccgaggctggcagatcactcgcggtcaggagctggagaccagcccggccaacaaggcgaaaccccgtctccaccaaaaaatacgaaaaccagtcaggcgtggcggcgtgcgcctgcaatcccaggcactcgacaggctgaggcaggagaatcagtcagggaggttgcagtgagtcgagatggtggcagtacagtccagccttagctcggcatcagagggagaccgtgcaaagagagagacgagggagagggagagggagaccgtgcaaagagggagacgggagcgagagagggggagggggagggggagagattatttccttatgtattttctaattttgaatggtgagct

SEQ ID NO: 42845 - DNA, 1361 bp, Artificial sequence
  DNA replication origin
aaatgaacacaaggtagctggatgcaggccagctgatgtgcattaagctcacacttaagcgccaggcacattctatgtgattagctccactacccgcttagcaacgctttgaggcaggcactgttagcatcattctcatctgaaaggtaaggaaaccgagatgcagagaggtcaaacacttgctggagataatagagcctactatgtagtaccaccaagaggtgcagcaggcactacgctccagaggcactgctattcctcctcccccaccttgctatccaccgaggcccccatgttcatagtctctgcagatagtcctgagagtggaatggcggactggggtgcaggaaggatcctgcaagacctcacagtagagatgtcatgcgcactgtgtgggaagaatgaatgcaagtgctccaggtccacagtgggaggaaaggcattctgggcagtgggaagtagaagtagcctcatgtggctggagccagaagctaaagtgggagtgccagaaggagggcagaagccatagacccttgtgcacatactggaagagctgcttttttaacagtcaagtgcacaagggtctatgcggtgttaagatcacgatgggaacatgctggtgggctaggaaactcaagaggttagttccagaagagtctgtggaattctgccccacaggctccggaggcatggggggaaggccatagaagagctgtcgtgggtaaggaagattcctgcagccgtgaaatagcaagcaagctagggaagaactctaacaggaggcagaaatggaagggaaagcaccatgcggggagagaagtgtagaggcaggcatcgggggagctaggggagccaggccctgggggttggaggggaggcggccggtggcaatgaaggccttcgcccacccctcttccgccccctggcaaggcaggttgctaatacccgccctgggataggggtgggagtggttctggaaccgccttctgagactcattcccatcaaaagcaacacttggggtggagggaggaagaggacgccaaccccagtgcctggccgggttctagatgtgcagagaacaaaaaggaaccctaaaaacccagcatccccttctccgagggaggctttcctagacccagaacctcagcccacccggaacccctttgcccctctcttagcagtggacctgtcatgtggttcctcctggactagtgtaatctctgctatgcgtcttgtcctgccatgctgaacttctcacagtgcggcctccgaaggagcccccatctagcgctccttgcagtcgcagaagattccttctccccttactgagccttagagttttccaaacccatttcctcct

SEQ ID NO: 42846 - DNA, 1627 bp, Artificial sequence
  DNA replication origin
cgccagtcaggccccgccccccggcggcacgggcgggggcaggggcggcgccggcagagtggggcgcgggcgcgcggtgctcggtgcgcgccgccgcccctccggcccggcttgcccgcccgctctcccaaccccctcggcccactccgtcgcccccacccctccttcctccactcggccaggcggccggcggcccggtgcgcggggcagcgcgacgattgcggcctggcgatcggggcactgcggtcgtggcgcgcgaggcgcggggcgcgaggccagccctggaacggcggggtgtggggggcgggcagctgcggagcccccagaggaaagcaggggcaggcaggggggtgccgaggtaatgggccgggcctgggcgcccggctgcgaggggcgggggttccaggcgcacttcggccctggaggggcgggcgacagggtgcccggggcggtgggagggcagcggggaggggaggaagggagggaggagacggctgggccggaccggggggcttggccgacggggagcaggtgggcggggacagggcccctgctggaagaggcgcagcagcgaggtggcgggctgcgtgcgcaaacagggcggccgccttctgggcccggagaacggtgaggccatttgggttgggtgtcccagtcccgagggcacggttcggtatccagggccaacgagctgggtgcagggcattgttgaggagggaagatctagaggcctgtccgggccaaggggatggggcgtattgaacagctccgggagaagagtgttgctgggtcagggcgctggtgtccagcgaaggtgggcgaggacaggcactttcagggctggcctgagtggaaagggacaagggggccccagagtttgagtttgagcataatttgggagttgtcgtgtcactgggtgggtcgatgagtcatgcgatttggagaaccctttcctggcgatcagttctgagggatggaaataaagtctagggtttggagaagtggtttggaggccatgtcttgggacaccaggtgctctggtggtcaccaggcttcatgtgagggactttgggagttgtgtcccagaggcctgagattcagaagcttcagtctggggtggagttaagcaaggtctttgtggtggccagttccctgccttccttcctttccaggctgtcaggattcagctgtgttcctgcggggagtgggttaaaaattccttccgcctacagtcagctttacagtatccaccaggggcatgggggacatatacatgtgtggctgcagcatcattctttgtcgtggagccctcacgattgcttccttattgttgccatagtaactgtctactgatggtgtatttataggggaagaagcaggcgctacattttggggagggagggggaagaggcctcgtggcaggcagcagcagcagtgaaggtggctacagaattgctaatggagtgggccatgccatgggaactgttttgggggtgttcctggctcgactgaagcttaaaaatgaactggtgactttagcaggtgcgtcaggataacatgtattcgggtctatgataggtgtgacatatagccacctttgaccaaggctaggtgtgtgggggacaaa

SEQ ID NO: 42847 - DNA, 1223 bp, Artificial sequence
  DNA replication origin
tagggtcctgaggttgatgcctggcagagcctgcccccaccagtcttgcactgatcaccccaagctctgacttcagaatcccctgaggcttaagtggcagtggggtggtggcccccccaccacagactgagaagtctccaggagtggcccagggctggcagcaggggtggtgttggattttttgtggtcgtctatgtggggtgggggtcctcctgagtcctccctcagcatctcaccttgtctccttatagagcctgggcgggcttccctccgccagtctcaagctgcgagtcagacgcagaagctcgcttgtctctaacccccagtgcgcaagtcagtggcatcacatccgggcagctggggctttccttggttgaaagcgggggcggaaccggggatcctgcctggatgggggtatgggtgttggggggtgggggtgcaggtgtggggtgggggatgagggtgcgggggttgaattggggatgggggtatgagggtggcacggggttggggaggatggggtgctggtaggggatgagggtgtggattgggttaggagtgtggaagggaatgggaatggggtgggggataggaatgggggtggggaaccctcagctctctcttagggtcctgactttgacgcctggcacagcctgcccccaccttgcctcctcacagagcctgcgcctgcttccctccgtggatctcgagttgctggtcagaccaatgcgcaagtcagggatgtcacatccgggccacctgggttgacagcaggggtggaaccggattcggccagggtgggagttggggtgggggaggaggcgagaggtcctggggttaggggttgaggtaggcgtgcccctcagtcctttgattcctggcatagcctggacccctgttctctgcggatggtgtctgctcccctcagaccaaggttctgactcctagtcccctgaggtcacagtggggggagaggtgtccttgggcgacaaagccgctggggtcttccagggctgacaggagggactaagctggattctgtggcccctctttgagcgggggtttaccctcagtcttcactcaggagggtcctcttcctgggtcctggctctttgttgaagtgatgggttggagatgctctttttctctcacctctgagcatttgcccagctgtaccccttgcagaaaatggctgcgggtaccaggcgaggtgttccctgggt

SEQ ID NO: 42848 - DNA, 2343 bp, Artificial sequence
  DNA replication origin
ggggatgggaataggggtggggtacgcttagccctctcttacggtcctgagattgatgcctggcagagcctggcctcactagtcttacactaaacaccctaagctctgactccagagtcctctgcgacttcagaggcagtggggtggtgggcgccccagactcagaagtccgcccacaggtggcccacggctggtagcaggagtggtgcgggattatttggggtcgtctatctggggtgggggcctcctgagtcctccctcagcatctcaccttgactcctcacagggcctggcccgcttccctccgccaatcccaagcggctggtcagagcagctcgcttctctctaacccccaatgcgcaagtcagtggcatcacatccgggcacctgggactttcttgggttgaaagcggaagcggaaacccgattcagcgtggaagggggtgggaggggtgaggtcggtggagggggcgggtttttgggggtgggttgaaagcggaagcgcaacccaattcagcatccatgggggtgggaggggtgaggttggtggaggggccccagtttttggggtgggagatggcggtgtgagagaggtgcggggttgaggataggagtgctggtgggggataggggcgcggatgggtttgggagtgcaaatagtaatgggaaaggggaggcggtgggggatagaaataggggtggggtacgcttggccctctcttagggtcctgaggttgatgcctcgtagagcctgccctcactagtcttacactaaccaccccaagctcggactccagagtcccatgcgacttcagacgcagtggggtggagggcgccccagactcagaagtccgcccacgggtggcccacggctggtagcaggagtggtgcgggattatttggggtcgtctatctggggtgggggcctcctgagtcctccctcagcgtctcaccttgactcctcacagggcctggcccgcttccctccgccaatcccaagctgctggtcagacagagcagctcgcttctctctaacccccaatgcgcaagtcagtggcatcacatccgggcccctggggctttcttgggttgaaagaggaagcggaaatcagattcagcgtggatgggggtgggaggggtgaggtcgatggagggggcgggtttttgggggtgggttgaaagcggaagcggaacgtgattcagtgtggatgggggtgggaggggtgaggttggtagaagggcccgggttgttggggtgggagatggcggtatgagagaggtggggggttgaagaggagaggagtgctggtgggggatgggggcgtggatggtttgggagtgcaaatggtaatcggaaaggggacgtggtgggggatgggaataggggtggggtacgcttagccctctcttagggtgctgaggtccatgcctggcagagcctgccctcactagtcttacactaatcaacccaagctctgactccagagtcccctgcaacttcagaggcagtggggtggtgggcgccccagactcagaagtccgcccacgggtggcccacggctggtagcaggagtggtgcgggattatttggggtcatctatctggggtgggggcctcctgagtcctccctcagcgtctcaccttgactcctcacagggcctggcccgcttccctccgccaatcccaagctgctggtcagacagagcagctcgcttctctctaacccccaatgcgcaagtcagtggcatcacatccgggcccctggggctttcttgggttgaaagagggagcgcaacccgattcagcgtggatgggggtgggaggggtgaggtcggtggagggggcgggtttttgggggtgggagatggcggtatgaaggtggtggggtgtttgggaggatggggagctggtggaggatgggagtgtagatgggtttgtgagtgcgaatgggaatgggaaggggttaggggatgggaatggggttgcgggatgggaatagcggtgtggtacgctcagctggcttttagggtcctgaggttgatgcctggcagagcctgcccccaccagtcttgcactgatcaccccaagctctgacttcagaatcccctgaggcttaagtggcagtggggtggtggcccccccaccacagactgagaagtctccaggagtggcccagggctggcagcaggggtggtgttggattttttgtggtcgtctatgtggggtgggggtcctcctgagtcctccctcagcatctcaccttgtctccttatagagcctgggcgggcttccctccgccagtctcaagctgcgagtcagacgcagaagctcgcttgtctctaa

SEQ ID NO: 42849 - DNA, 1017 bp, Artificial sequence
  DNA replication origin
tgagattgatgcccggcagagcctggcctcactagtcttacactaaacaccccaagctctgactccagagtcccctgcgacttcagaggcagtggggtggtgggcgccccaagctcagaagtccgcccacaggtggcccacggcaggtaggagtggtgcaggattatttggggtcgtctatctggggtggtggcctcctgagtcctcctcagcgtctcaccttgactcctcacagggcctggcctgcttccttccaccaatcccaagctgctggtcagacagcagctcgcttctctctaacccccaatgcgcaagtcagtggcatcacatccgggcccctgaggctttcttgggttgaaagcggaagcggaaacacgattcagcgtggatgggggtgggggggaggtcggtggagggggcgggtttttgggagtgggttgaaagcggaagcggaacccgattcagcgtggatgggggtgggaggggtgaggttggtggaggggccccggtttttggggtggcagatggcggtatgacagaggtggggggtcgaggaggagtgctggtgggggatgggggcgcggatgggtttaggagtgcaaatggtaatgggaaaggggacgtgatgggggatgggaataggggtggggtacgcttagccctctcttacggtcctgagattgatgcctggcagagcctggcctcactagtcttacactaaacaccctaagctctgactccagagtcctctgcgacttcagaggcagtggggtggtgggcgccccagactcagaagtccgcccacaggtggcccacggctggtagcaggagtggtgcgggattatttggggtcgtctatctggggtgggggcctcctgagtcctccctcagcatctcaccttgactcctcacagggcctggcccgcttccctccgccaatcccaagcggctggtcagagcagctcgcttctctctaacccccaatgcgcaagtcagtggcatcacatccgggcacct

SEQ ID NO: 42850 - DNA, 1057 bp, Artificial sequence
  DNA replication origin
ggggatagaaataggggtggggtacgcttggccctctcttagggtcctgaggttgatgcctcgtagagcctgccctcactagtcttacactaaccaccccaagctcggactccagagtcccatgcgacttcagacgcagtggggtggagggcgccccagactcagaagtccgcccacgggtggcccacggctggtagcaggagtggtgcgggattatttggggtcgtctatctggggtgggggcctcctgagtcctccctcagcgtctcaccttgactcctcacagggcctggcccgcttccctccgccaatcccaagctgctggtcagacagagcagctcgcttctctctaacccccaatgcgcaagtcagtggcatcacatccgggcccctggggctttcttgggttgaaagaggaagcggaaatcagattcagcgtggatgggggtgggaggggtgaggtcgatggagggggcgggtttttgggggtgggttgaaagcggaagcggaacgtgattcagtgtggatgggggtgggaggggtgaggttggtacaagggcccgggttgttggggtgggagatggcgatatgagagaggtggggggttgaagaggagaggagtgctggtgggggatggggcgtggatggtttgggagtgcaaatggtaatgggaaaggggacgtggtgggggatgggaataggggtggggtacgcttagccctctcttagggtcctgagattgatgcccggcagagcctggcctcactagtcttacactaaacaccccaagctctgactccagagtcccctgcgacttcagaggcagtggggtggtgggcgccccaagctcagaagtccgcccacaggtggcccacggcaggtaggagtggtgcaggattatttggggtcgtctatctggggtggtggcctcctgagtcctcctcagcgtctcaccttgactcctcacagggcctggcctgcttccttccaccaatcccaagctgctggtcagacagcagctcgcttctctctaacccccaatgcgcaagtcagtggc

SEQ ID NO: 42851 - DNA, 1120 bp, Artificial sequence
  DNA replication origin
ggggtggggtacgcttagccctctcttacggtcctgagattgatgcctggcagagcctggcctcactagtcttacactaaacaccctaagctctgactccagagtcctctgcgacttcagaggcagtggggtggtgggcgccccagactcagaagtccgcccacaggtggcccacggctggtagcaggagtggtgcgggattatttggggtcgtctatctggggtgggggcctcctgagtcctccctcagcatctcaccttgactcctcacagggcctggcccgcttccctccgccaatcccaagcggctggtcagagcagctcgcttctctctaacccccaatgcgcaagtcagtggcatcacatccgggcacctgggactttcttgggttgaaagcggaagcggaaacccgattcagcgtggaagggggtgggaggggtgaggtcggtggagggggcgggtttttgggggtgggttgaaagcggaagcgcaacccaattcagcatccatgggggtgggaggggtgaggttggtggaggggccccagtttttggggtgggagatggcggtgtgagagaggtgcggggttgaggataggagtgctggtgggggataggggcgcggatgggtttgggagtgcaaatagtaatgggaaaggggaggcggtgggggatagaaataggggtggggtacgcttggccctctcttagggtcctgaggttgatgcctcgtagagcctgccctcactagtcttacactaaccaccccaagctcggactccagagtcccatgcgacttcagacgcagtggggtggagggcgccccagactcagaagtccgcccacgggtggcccacggctggtagcaggagtggtgcgggattatttggggtcgtctatctggggtgggggcctcctgagtcctccctcagcgtctcaccttgactcctcacagggcctggcccgcttccctccgccaatcccaagctgctggtcagacagagcagctcgcttctctctaacccccaatgcgcaagtcagtggcatcacatccgggcccctggggctttcttgggttgaaagaggaagcggaaatcagattcagcgtggatgggggtgg

SEQ ID NO: 42852 - DNA, 1009 bp, Artificial sequence
  DNA replication origin
cccggcagagcctggcctcactagtcttacactaaacaccccaagctctgactccagagtcccctgcgacttcagaggcagtggggtggtgggcgccccaagctcagaagtccgcccacaggtggcccacggctggtaggagtggtgcgggattatttggggtcttctatctggggtggtggcctcctgagtcctcctcagcgtctcaccttgactcctcacagggcctggcctgcttccttccaccaatcccaagctgctggtcagacagcagctcgcttctctctaacccccaatgcgcaagtcagtggcatcacatccgggcccctgaggctttcttgggttgaaagcggaagcggaaacacgattcagcgtggatgggggtgggggggaggtcggtggagggggcgggtttttgggagtgggttgaaagcggaagcggaacccgattcagcgtggatgggggtgggaggggtgaggttggtggaggggccccggtttttggggtggcagatggcggtatgacagaggtggggggtcgaggaggagtgctggtgggggatgggggcgcggatgggtttaggagtgcaaatggtaatgggaaaggggacgtgatgggggatgggaataggggtggggtacgcttagccctctcttacggtcctgagattgatgcctggcagagcctggcctcactagtcttacactaaacaccctaagctctgactccagagtcctctgcgacttcagaggcagtggggtggtgggcgccccagactcagaagtccgcccacaggtggcccacggctggtagcaggagtggtgcgggattatttggggtcgtctatctggggtgggggcctcctgagtcctccctcagcatctcaccttgactcctcacagggcctggcccgcttccctccgccaatcccaagcggctggtcagagcagctcgcttctctctaacccccaatgcgcaagtcagtggcatcacatccgggcacctggg

SEQ ID NO: 42853 - DNA, 960 bp, Artificial sequence
  DNA replication origin
ccggcagagcctggcctcactagtcttacactaaacaccccaagctctgactccagagtcccatgcgacttcagaggcagtggggtggtgggcgccccaagctcagaagtccgcccacaggtggcccacggcaggtaggagtggtgcgggattatttggggtcgtctatctggggtggtggcctcctgagtcctcctcagcgtctcaccttgactcctcacagggcctggcctgcttccttccaccaatcccaagctgctggtcagacagcagctcgcttctctctaacccccaatgcgcaagtcagtggcatcacatccgggcccctgaggctttcttgggttgaaagcggaagcggaaacacgattcagcgtggatgggggtgggggggaggtcggtggagggggcgggtttttgggagtgggttgaaagcggaagcggaacccgattcagcgtggatgggggtgggaggggtgaggttggtggaggggccccggtttttggggtggcagatggcggtatgacagaggtggggggtcgaggaggagtgctggtgggggatgggggcggggatgggtttaggagtgcaaatggtaatgggaaaggggacgtggtgggggatgggaataggggtggggtacgcttagccctctcttagggtcctgagattgatgcccggcagagcctggcctcactagtcttacactaaacaccccaagctctgactccagagtcccctgcgacttcagaggcagtggggtggtgggcgccccaagctcagaagtccgcccacaggtggcccacggctggtaggagtggtgcgggattatttggggtcttctatctggggtggtggcctcctgagtcctcctcagcgtctcaccttgactcctcacagggcctggcctgcttccttccaccaatcccaagctgctggtcagacagcagctcgcttctctc

SEQ ID NO: 42854 - DNA, 2792 bp, Artificial sequence
  DNA replication origin
ctgactttgattcctggcagggcctgggccatgccctctcctaaccagcccttccctgatcacaccaacctctgactccagagtcccctgtggcttaaacaaacgcgttgcgaagggggcggaggtggggagcagcccagtctgagaagtcagcctccgcggggtagtccagggctgggaccctctatcagggataggggtttcctgaatcctccctcagagtctcactttgcctcttcacaaagcctgggccaccttccctctgccgatctcaagccacccttcagacccagaaactcacttctctctaaccctcaattcacaagtcagtggcatcacatccggccacccagggcttgcctggattgaaagcaggggtggaaccggatgctgcgctgatggggatgaaggtaggggtgggggaggggggtatgaggctggttggggggttggggaggataggggcacaggtggggaatgggggtacagatggggtagggagtgcagatgggaaaggggtaggggataggaatgggggtgggggacactcagccctctcctagggtcctgacgttgatgcctggcagagcctacccccaccagtcctgcactgatcacaccaagctctgactccatagtcccctgcggcttcagcggcagtggggtggtgggcgtcccagactcagaagtccgcccacgggtggcccaggactggaagcaggaggggtgccggattatttggggtcgtctatctggggtggagagggcctcccgacttctccctcagcttctcactatgccacctcacagagcctggaccggcttccctctgccaatcccaagctgcctgtcagactgagaagctagcgtctctctaacccccaatgcacaagtcactggcatcacatccaggaacctggagcttccctgggttgaaagcagaaacggaatgcgattcaacctggatggggatagtggtgttggggtgggggatgaggacataagggtagtgggggtttggggaggataggggtgctggtgggggatagggtgtagatggggttgggagtgtggatgggaatgggaagggggatgggaatgggggtgggggaccctcggccctctcttacagtcctgaggttgatgcctggcagagcctgccctcaccagtcttgcactgatcaccccaagctctgactgcagagtcccgtgcgacttcagaggcagtggggtggtgggcgccccagactcagaagtccccccacgagtggcccagggctgggagcatgagtggttcgggattatttgggattgtctatctgcggtgggggcctcctgagtcctccctcagcgtctcaccttgactcctcacagggcctggcccgcttccctccaccagtcccaagctgctggtcagacagagcagctcgcttttctctaacccccaatgcgcaagtcagtggcatcacattccggcacctgcggctttcttgggttgaaagcggaagcagaacccgattcagcgtggatgggggtgggaggagtgaggtcggtggagggggcgcgttttgggggtgggttgaaagcggaagcagaacctgattcagtgtggatgggggtgggagaggtgaggttggtggaggggcccgggttttggggtgggagatggtggtgtgagagaggtgcggggttgaggaggataggagcctggtgggggatgggggcgcggatgggtttgggagtgcaaatagtaatgggaaaggggagggggtgggggatgggaatgggggtggggtacgcttagccctctcttagggtcctgaggttgatgcctcgtagagcctgccctcactagtcttacactaaccaccccaagctcggactccagagtcccatgtgacttcagacgcagtggggtggagggcgccccagactcagaagtcagcccacgggtggcccacggctggtagcaggagtggtgcgggattatttggggtcgtctatctggggtgggggcctcctgagtcctccctcagcgtctcaccttgactcctcacagggcctggcccgcttccctccaccaatcccaagcggctggtcacagagcagctcgcttctctctaaccccgaatgcgcaagtcagtggcatcacatccgggcccctggggctttcttgggttgaaagagaaaccagaaatcagattcagcgtggatgggggtgggaagggtgaggtcggtggagggggcgggtttttgggggtgggttgaaagcggaagcggaacgtgattcagtgtggatgggggtgggaggggtgaggttggtacaagggcccgggttgttggggtgggagatggcggtatgagagaggtggggggttgaagaggagaggagtgctggtgggggatggggcgtggatggtttgggagtgcaaatggtaatgggaaaggggacgtggtgggggatgggaataggggtggggtacgcttagccctctcttagggtcctgagattgatgcccggcagagcctggcctcactagtcttacactaaacaccccaagctctgactccagagtcccatgcgacttcagaggcagtggggtggtgggcgccccaagctcagaagtccgcccacaggtggcccacggcaggtaggagtggtgcgggattatttggggtcgtctatctggggtggtggcctcctgagtcctcctcagcgtctcaccttgactcctcacagggcctggcctgcttccttccaccaatcccaagctgctggtcagacagcagct

SEQ ID NO: 42855 - DNA, 1453 bp, Artificial sequence
  DNA replication origin
gcctccccggctccccaccgcagcagccgtcacgtcgtcggagatttccatcggggcgggcctggggcggggagcgcgggacggggcggggcgagtgggaggagtgaaagttggagcccagcaaaagcctccgccccgcgctcagtgcggccagagcgtgagccgcgacctccgcgcaggtggtcgcgccggtctccgcggaaatgttgtccaaagttcttccagtcctcctaggcatcttattgatcctccagtcgaggtgagtctccatcccgggacccgggagcccttcgcgcccagctccctctccccgggagccgggacggctcccgggaccccagcggccccgcgttcctcgagccccgcgcccgctttgccccggccctaccgcgggctggccgagtcccgcgtcccctcgatgcgcgccggcctcggcccgcctcactgtaggatgggctcccggggtccttgagggggagctccaaaaggaagacaggacgccagaaggaagacgggactccagttcgcggattcccgctctcagaagcactgcggtggcctggtgacaagcactcctcggagtcttgcgcaggaacaggggagcggccccggggtgaccggccagggcaggcttcagctactgggggggccggaggtgcattttgagaagggggtgcgcgggctgagggagcttagctgcgccaaaaatgtgtgagtgttgcctcgtgtgttctctgctgctcacattttttttaagagtgcctactgagttccaggcactgcgccaggcaactctgacattacttgcttcccatgccgctgctcctgttggtgccagtctcaggcacgagctttggtttagtctaagggttcccgcaccagctatgccccctctccaccgctgacagcctcccacttccttaactcatccctagacaccctgctgggccttgggcagactggagccagaggccaggaatattattctcctctgaagtctgtggtttgggccgtagatttcaatccccttctcccctttcaggtttcccttgaacaaccatcttccctcacaccttctcctcgccctgagacttggctaggagggtcgtgccctggatttgtggctttttggggtggaagatgactgcttcgttttgttgttgttgttttgagatggttcctgctgtgtgtgaagtgtcacaaatttgcaagcttcctgatctgtggagctttctcgaagattccatggcactgggcttgtgtcttgtttgtctgttctggggagggagggtggcttctctccctaccccagattgcgttagctcatcagagaaggggatgtgtagctgcttgctggctcactggtgccctggagtggggctagcctcagcaggagcttgataaatgtctttctatgcgtgctagcaatttccagtcatccacatccctcaaa

SEQ ID NO: 42856 - DNA, 1498 bp, Artificial sequence
  DNA replication origin
ctggggtcccgggagccgtcccggctcccggggagagggagctgggcgcgaagggctcccgggtcccgggatggagactcacctcgactggaggatcaataagatgcctaggaggactggaagaactttggacaacatttccgcggagaccggcgcgaccacctgcgcggaggtcgcggctcacgctctggccgcactgagcgcggggcggaggcttttgctgggctccaactttcactcctcccactcgccccgccccgtcccgcgctccccgccccaggcccgccccgatggaaatctccgacgacgtgacggctgctgcggtggggagccggggaggctcgcgcgggcgcgggaaggaggcgggagcccggttgctgaggccccccgtccccacgccgccactgcggcgctgccagacagccaggggcgggggaggcggagggaggaggcggcgagcccgcggcgcggggcctgggcgggggaaactcgcgccccaggctgtggccggcagggagctgcttcagggacaagatgtggggctggatgtgctcacgccccagaggcgaccccctcctgcccgctggcacgccgcggggtcaaactgtgctctccagccgtggcttcctccccgccacctgttgcaccccattgcttccccaagtgtcctggcttcaacctccctctctggttttcccagctctcagcccacaatcttcagtccttcggaatacaagtcttgtcgtatgaaggaagccgggtaactcagcaccttccttggcaccgagaagaagagagacaggggtctccccagcaagctctgatgtgaggtattccacagggcaaattcccaggtatttgggggcagggaggacccgccaacagaggaccaggcggagacattcactggagaattttctctgaaccccaagggggcactgccacaatgtggctcccgctttggccccagaagctgagtgtgagagggaccaactggaatagaggaggctttggaaacctccttgagactggatggccgaatctttctggagacttggcaccaggtgatagcagaagaagacacgagaaggcacagagggggaaggggaaggggcagtgccccacttcaggggagacacgtcaagagtctcaagcatacttggacttcatcttctttccctagacccttctgatttgcttcagaaggagaaggaatggcaaagatttgtgtaccaagctgatgccagacgctggcagcatcctcacctgttgctccagaaggggctgtgtgcatccttgaagaggcttagctctaccacactcacctacaacaccctcttcaccaccccacctcccaagcacatcactctgctttgtcctcttcacaacactgctcactcattgatgattatcttgggcattttttatgagcttgtttacagtgggtctctcctactgaagtaagctcagggacaaacacacacatgcatacacacaa

SEQ ID NO: 42857 - DNA, 1603 bp, Artificial sequence
  DNA replication origin
ctctcagggtcctgattttgatgcctgacagagcctggcccctgccctctcctgaccggcccttccctggtcacaccaaggtctgactccagagtcccttgtggcttaagtggcagtggggaggggggaaggtccagcctgagaagtctgccctgggtggtccagggctggcagcaaaggtagtactggattatttggggttctctatctgggtgagggcttcctcattccttcctcgggggtctcaccttgcctcctcacagagcccgggcccattcccctctgctgatctcagtcggcttctcagaaccatgcccttgattctctctgacccgcaatgcacaagtcagcagcatcacatccggccccctagggcttccctgggttgaaatcaggggcagaatcggattctgccaggataggggtgggggatgtgggatagaggtgccggtagggatggggtgggggaatggggggtgtaggtgggggacggaggtagggacaggaatagagtttggcgtgggggtagcctcagctttcccttaggttcctgacgttgtttcctggcagagcctgggagctgtcctctcctaaccagtcctgccctggtcataccaagctctgtctcctgagtcccctgcggcttaagcggtgggggactgggggtggcccagcctaaggagtcctgccctggatggtccagagctagcagcaggagaggtggcactggattatttggggtccactaccaggggtgggatactccttagtcctccctcagcatctcaccttgcatcctcacagagccagggccagctgccctcagctgatctccagctgcccctgagagcgaggcccttgcttctctccgacctcaaatgtgcaagacagtggcaccacatctggtcacccagggattccctgggttgaaagcaggagcagaaccgaattctgccagggtgtgggggggtgggagggtgaggaggagggtcaggggtggggaagatgggaatggtgggagtagggatgaacgtggtggggagtgggcaggatagggtttctggtgggggataggggttctggtgggggatggaggtggggatggggatggaaatggggatggggtgggggatgggaatgggggttgggggccctcagccctcacttagggtcctgatgttgatgcctggcagagcttggccactgccctctcctaaccagccctgccttggtcacacgaagctctgactccagagtcccttgcggcttaagccacaggggctggcagggtgcagggagtggcccagactgagaagtccgcccccaggtggtttagggctggcagcaggagtagtgctggattatttggggccctctatctggggtgggggcctcctgagtcctcccttagagtctcaccttgcctcttcacagagcctggacccacttccctccaccaatctcaagccgccactcagagcgagaacttcgcttctctttgacccccaacgccaagtcagtggtgtcacatccgggcacccggggattccctcggttgaaagcaggggcgaaaccggattctaccagaatgtagggatagggg

SEQ ID NO: 42858 - DNA, 1832 bp, Artificial sequence
  DNA replication origin
gccctctcctaaccagccctgccttggtcacacgaagctctgactccagagtcccttgcggcttaagccacaggggctggcagggtgcagggagtggcccagactgagaagtccgcccccaggtggtttagggctggcagcaggagtagtgctggattatttggggccctctatctggggtgggggcctcctgagtcctcccttagagtctcaccttgcctcttcacagagcctggacccacttccctccaccaatctcaagccgccactcagagcgagaacttcgcttctctttgacccccaacgccaagtcagtggtgtcacatccgggcacccggggattccctcggttgaaagcaggggcgaaaccggattctaccagaatgtagggataggggggtgagggtagggtagatgagggtgggggtggggtgggatgagagtagtggggcctggggaggatgggggttctcatgggggatggggttaggagtgtagatggaaatggggatggagtgggggatgggaatgggggtggggggccttcagccctaacttagggtcctgacgttgatgcctggcagagcctgggccctgccctctcttaagcagacctgctgtgactccagagtcccctgcggcttaagtggcagggttggcagggtgctggggggtggccctgactgagaagtttgcccctagatggtccagggctggcagcaggggcgaagctggattatttggggccctctatctggggtgggggcatcctgatccctccctcagccctcaccttgcctcctcacagagcctgggcccacttccctcctccaatcccaagccgcctgtcagaccaagaagctcgcttctctctgacccccaatgcgcaaatcagtggcgtcacatccaggccaggggcttcccggggttgacagcaggggaagacccagattctgccaggatggagctatagaggggtaagggttggggagatgagggtggggatgggggagggatgaagatggtggggactggggaggatgagggtgctgttggggaatgggggtgatgatggggttgggaatgaagatgggaatggggatgtggtaggggatgggaatagggaagaggggccctcagccctccgttaggttcctgatgttaatgcctggcagagcctggacgctgccttcttctaaccagccctttcctggtcacaccaggctctggctccagagtaccctggggcttaagccacggggggctgggggcggccctgcctgagaagttggctggcagcaggagcggtgctggattatttggggctctctatctggggtgaggtgtcctcagtcctctctcagcgtctcaccttaacccctcacagaacctgggcctgcttccttccaccgatctcaagctgctcctaagaccaagaacctggcttctctctgatacccaatgcgcaagtcagtggcatcacatccgggccacctggcgcttctgtgagttgacagaaagcggggaaccggatcctgccttaatgtgggtgggggtggcggtgcggggtggcagtcttggtgttgagtatggggttgggggtggcagtggtgatcatggcactgtgggtcgtggtgggggtgggagtgggggtggggaagcctgccattcctcagggtgctgacgttgatacctggcagagcctgggcccctgttctctgttgattgtgtctgcttccctcagaccaagtttctgactctgagaaatgtggtcaacgtgacaacattgccagggtcttccagggctgacaggaggggctgagctggattct

SEQ ID NO: 42859 - DNA, 1327 bp, Artificial sequence
  DNA replication origin
agccctccctgagcgtcccgacattgatgctggcagaacctaggcgcggctcccgccgaaccagccgggccctggtcacaccaagctctgactcccagagtcccctgcggcttaagcggcgggagagagtgggggcgggggtggggggggggtgacagcccagcctgagaagtctgccctcaggtggtccagagctggcagcagaggcagcgctgtattatttagggctttctatctgggttgggggcgtcctcagtcctccctcagcctctcaccttgcctcctcacagagcctgggcccgctctcttcagccgatctcaagcctgtccctcagaacgagaacctcgcttctctctgatccccgaggcgtaagttagtggcgtcacatccggtccccggggcttccctgggttgacagcaggggcggagtggattctgccggaactggggtgggagttggggtgggagtgagggtgggagtccgggtggggtggggtacgggtgaggatggggttggggcaggggtggtggtgaagatgagtgtggggaggggcgtggaggtgggaactgggatggggatcttggggctgtgggtcgtggtgggggtgggggtggggtctttcagtcatccctcagtgtctcgaccttgatgcctggaaaagcctggacccctgttttgtgctgaggatgtcttctccccttaaaccaggtctcttgactcggagtcttccaaggtggcagtgaggggagggttgtggtaggggtgacaacattgccagggtcttccagggctgacaagaggggctcagctggattctgtggcccctttgtgaggggtgggtggaccctcggtcctcactcaggagggtcttcctcctggcttttgtctctttgatgaagtgatgggtgggagatgctcagtttccgtcacctctgatcatttgcccagctgcatcccttgcagagcatgggtgcggttcccaggccagatggtccctggggagctgcaacacccgtgattgtaatgacctatgggagaagacgcacaccttcccaacggggctcttcccaagccacaagtagacttggcaaactttttgtcctaaagggtatattttctacaagaaagaggctgagcatcggggtgtggagaggtcctgctgttttgagtttagctgatattttatagtccaatgcagtgatgtctggttttctaaccctcattcctagtaaaaatatgtgttttaaatgtctgccaagtgtatattgaatacatatataacatttcatgaaagaatacctaccttacgctgtgtggttcactgc

SEQ ID NO: 42860 - DNA, 1988 bp, Artificial sequence
  DNA replication origin
tgagggcgcgggagacggggccgcgaaaaggaacagaggtggggtgggagagtgggtgactactggggccggggaaggcgggattgctggcccttccccaaagagtcgcctctaaggagagagcagcgagggcaagggaagtagggggtgcgggggtcggcccggataccggagatgagagcccgggaggagcaaccacccagcagctctgctggacgcagctccccccagggcccgcccggcagctgcgaggtgcgctccgtctgcggccgctcctggctgcgactgggcacagatcccagctcgctgctggctccgcccactccgacggcatcgcaggcccagccaatcggacagctgccaggagccgcacaaaaaggcgcgcgctcctgcctccgcccgtagcctgcgcgccgcccggcccccgccccttcaggcttctgcagtcatcccccggccatctccagacacaggcagggcggggccgggctgggggagggggaggagggctggctccttgggggctgggccaggaatccgcctcaaggggcactgggtcctgtctcttctctgcaaaatgcgaaatgtgtgtttttcttggaagaaagggcctgtgcccgagagttgtatttgatggtgaagggagtgtggtaatttgaccgccatggctgaatctgcattctgaaagacttggacaattttgggcgtcaggaggtacccaacggctggtgactccgtacccttgagcctccagtaaccccgcgtgccttgtctctggataaggtcaaggaggatcctaatgggttttgttacagggctctggccacagcaggactgctcctccctcaggatggacattgggctacaggagcccaagagttgcttaagacttaaatttcctagagtgctcttcaccccaactttgggtactcaggaaaaagactcaaggaactggaagggctcaccaactggggtctctctgagatgtggttgtgtctcatcagccaggggatgcagaatgaaggttcatggctgacaccatagaaggggaaaaaaaggccaaggtcagtgtttggggtgttcaagggagttaggcactggagaccagggtatgccaatgttcctgggttctgaccccatcatatggaaaagcctgacatcttgactagagggctcttattctttccactacctcagactctgcccctatgggacagaaaaatcgtggaggataagaaatgcctccacccaatttcctatgtccttcctatcccatgacaaagcaagttcagaaagcttagaaagtggcctcaccagagcccatagggcaaatgggtaatcaacaaacagagctgccatgttcaccggcatgccacctcccacatcacaccattgagaagagttgaaatcaaaacggatttcaggtttacttttggttacctagaacattcactgagaaacacaacatctccccctttttttcccctcagtatttgatgaaatgagttgagattgctggtgcccagcaaagcatgacttacctggtaggccaagcagttttgcacagctgagggtttaactcttttaccactccccctttaaaatcattttagaaccatacttttatgaaaaatgtctctcatagtttcctgccttcttttaatgagcagaacaccctcacacctttctttcccatctcccctctttccctggccattgcagtaagaaaaaaggatgatgggacccatttgtcaggatcacatatgagagcagattaaacccacctctactgctaccagtcctgtcccatcacctctggtcacacagacgtccttgtagagaaaatccttgtttgccaaaaatgttagagccattccggggcattttgtccagccacctcggttgtaatgtagggaaactgaagcccagagaagaaaaagggattggcccaaggtcacacagtagcagaggccaaaactaaaaaccac

SEQ ID NO: 42861 - DNA, 1035 bp, Artificial sequence
  DNA replication origin
ctctcatctccggtatccgggccgacccccgcaccccctacttcccttgccctcgctgctctctccttagaggcgactctttggggaagggccagcaatcccgccttccccggccccagtagtcacccactctcccaccccacctctgttccttttcgcggccccgtctcccgcgccctcaggcgcccagaacgccccggccatgggcatccgaggcatgctgcgagccgcagtgatcctgctgctcatcaggacctggctcgcggagggcaactaccccagtcccatcccgaaattccacttcgagttctcctctgctgtgcccgaagtcgtcctgaacctcttcaactggtaagcgggcaccgccaggctaggcacggcggggacgggaatggagacgggcagacgacctctggcctcttggacggagcgggctgggggcgactcgggctggggggtactcggacccgggctcgctgagccctggcgcccgggccctgcctgttggcccctagaaggggtaaggtgggagtggggtgttgaaatggagccctgtgcttccgcccacctgttactgcggagcttgactgagccctgcgtgtgcctaaaccgcagcccgaggggtgggggcgggggtcgccctcgtcccaggatctgtccatccatccccaaggatttaaggttcccggcagctttccccagctttggcacctgtgggattggggaggagggtacaggatgacgggcaattcacaaaacatagacaggagagacacctgtttgagtctacattttagtccatttcctgaggcgcgcgcgcgtgcatgcatgtgttgaggggatgagggactctttccaatgcggcagatagaaatgattaactcaaacccatcggagcccagacagtgcgatcgtgtctgaataaacacgaaccgtgtggtctgggatgggtgtgcttttgtacttagtcgtgtgaaaatatttgaagactccggtttttttctctttttgattttaagtttgtttgggtgtgcg

SEQ ID NO: 42862 - DNA, 1275 bp, Artificial sequence
  DNA replication origin
acaccaagctctgactccagagtcccctgtggcataagcggcgggggttggcagggcgccggggggtggcccagactgagaagtactcccctaggtggtccagggctggcagcaggggtgacgctgaattatttggggtcctctatctggggtggaggcgtcctcagtcctccctcagcctctcaccttgtcttctcacagagcctgggtccacttccctctgccaatctcaagccgcccctcagaccgagaccctcgcttctctgaccccctagccgtcacatccggccaccaagcctggggcttccttgggttgactgctggtgtcatagcagattctgctatgagtgggggtggaaatgggggtgggggtggggggtcgaggtcgagggggtgggcactctcagtcatcctcaaggtcctgaccttgatgcctggcagagcctggatcccatcctgtgtggatggtgtctgctcccctcagaccaaagcactgactccgagtcccctgaggtggcagtggagggagggatatggtcggggcgacaacattgtcagggtcttccagggctgacaggaggggctgaactggattctgtggtccctctatgtggggtgagtggaccctcaatccttactcaggagggttctcctcttggctcctggctctttgatgaagtgatgggtgggggatgctctgtttctgtcacctctgagtattcgcccagctgtaccccttgcagagaatggctgcgggtcccaggccaggtgctccctggggagctgcagtgcctgcgattgtagtggcctctgggagaagacacacaccttcccacgggggctcttccccagccagatgctgggaagaaactgcatcaactaacgagcaaaataaccaggtagcatcataatgacaggatgagattcacacataacaatattaaccttaaatgtaaatgggctaaatgctccagtgaaaagacacagactggcaaattggataaagagtcaggacccatctgtgtgctgtattcaggagacccatctcacatgtagagacacacataggctcgaaataaagggatggaggaagatctaccaaacaaatggaaaacaaaaaaaggtaggggttgcaatcctagtctctgacaaaacggactttaaaccaacaaagatcaaaagagacaaagaaggctattacataatggtaaagggatccagtcaataagaagagctaactatcctaaatatatatgcacccaatacaggagcacc

SEQ ID NO: 42863 - DNA, 955 bp, Artificial sequence
  DNA replication origin
accctctctgagggtcctgaacgtgatggctggcagagcctggctgctgccctctcctaggcagccctgccctgatcacaccaacctctgactccagagtcccctgaggcttaagtggcagagagttgggggcggcccagcctgagaagtccgcccccgggtggtcctgggttggcagcaggggtggtgctggattttttagggtcctctatcttgggttgcaacggggtgtccctagtcctccctcaacgcctcacctttccttcacacacagcccgggcccgctttcctccgccgatcttaagccacccctcaaaaccaggccctcgcttccctctgatccctgaggcgcaaatcagtggcatcacatccgggcacccggggcttccctgcgttgacagcaggggcaaaacctgattctgtcggggtgggggtggggatgggaatgggaatggaggaggggtgggggcgaggatgggggtgaagatggggatggggatggggatcctgaggctgtaggtcgtggcggtgacggtgggcttgggggtgagggaggccctcagtcgttcctcagggtcctcaccttgaaacctggcagaacctgggccctgccctctcctaaccacccctgccttggtcacaccaagctctgactccagagtcccctgtggcataagcggcgggggttggcagggcgccggggggtggcccagactgagaagtactcccctaggtggtccagggctggcagcaggggtgacgctgaattatttggggtcctctatctggggtggaggcgtcctcagtcctccctcagcctctcaccttgtcttctcacagagcctgggtccacttccctctgccaatctcaagccgcccctcagaccgagaccctcgcttctctgaccccctagccgtcacatccggccaccaagcctggggcttccttgggttg

SEQ ID NO: 42864 - DNA, 1093 bp, Artificial sequence
  DNA replication origin
tgaaggcgcaatgagcacagagcacatttggccactgtgcccagcatcccccagcccaaggttgccactgatctggactccaaggtcccctcagtcctccctcttcttcctccccatgactcctcgcagggctgggccccaaccccctgctgaagtgggtctgcatccctaggattcccgtagccgaatgaaaaggtgcctcggtttgagacaggggtacagtgggccccctgtcctggcatgctgggtcccctcaggactccactgtcttccaggagggcctgggccctttcgctgcctcccaacggccatactcgcgataccgaaccccttccctcccttagccgtagatgtgaacctcaggactcacgtgcctggccgccattcccggagcttccgtgacttgataccaggggcaaagcccggattctgccaggataggggtgggggtggggatgggaatggggaatgggggatgggggtggggttggtgttgggggacgggaatggtggtgagggtggtggttaggctgccctcagttccctctcggggtcctgaccttgattcctgccacagcgtgggccctgacctcttctaaccagccctgccctggccacattaagctctgtccccagagttccccgtggctaaagcggcgggggtcggcggggtgaggtagtggcgacccagcctggaagtcttcccctgcggggtggcccaggcccggcagcagaggcagcactggattatttgaggccctctgtctgaggtgaggcccgcctcagtcctccctcagcgtcttaccttgcctcctcaccgagcctgggccggcttccctccgccgacgtcaggccgtcgctcgttgctcagggcgagaatctcgcggtcttctgacctccaatgcgcaagtcagtggcgtcacatcctggcaacggtactaccctgggttccgggcaggggtggaactggattctgcctggatggggatcggatgggggtggaggtaagcatgaagatggtgatggggcaaggggtaaggattgggacgggggtcctgaggctgtagatcctggtggggtcgggggagttggg

SEQ ID NO: 42865 - DNA, 1533 bp, Artificial sequence
  DNA replication origin
cattcggccactgtgcccaggatcccccagcccaaggttgccactgatctggactccaaggtcccctcagtcctccctcttcttcctccccttgactcctcgcagggctgggccccaaccccctgctgaagtgggtctgcatccctaggattcccgcggctgaatgaaaaggtggctcagtttgagacaggggtacagtgggccccctgtcctggcatgctgggtcccctaaggactccactgtcttccaggagggcctgggcccttcctctgcatcccaaaggccatactcacgagacccaaccccttccctcccttagccgtacatgtgaacgtcaggatccgcgtgcttggccgccattcccggagcttccgtgggttgattgcaggggcaaagcccggattctgccaggatggtggtgggggaggagatgggaatggggtttgggggtggggttggtgtttgagggatgggggtggggttggtgttgggggatgggattggtagtgagggtagggggtgggttgccctcagtcccctcttggggtcctgaccttgattcctggctgagtctgggccctgagcacttctaaccagccctgccctggtcacacaaagctcttacgccagagttccctgcggttaaagcggcggggggtggcggggtgaggtggtggcgactcagcctgagaagtcttcccctgcagggtggtccaggcccggcagcagaggcagcgctggattattgggggccctctgtctggggtgaggcccgcctcagtcctccctcggcgtcttaccttgcctcctcacggagcctgcgcctgcttccctccgccgacgtcaggccgttgctcagggcgagaatctcgctgtcctctgacctccaatgcgcaagtcagtggcgtcacatccgggcccgtgacttccctgggttcacggcaagggtggaaccggattctgcccggatggggatctggatgggggggtgggggtaagcatgaagatggtgttggtgtaggggtagggattgggacggggatcctgaggctgtagatcctggtggggtcgggggagttgggggtgggaggggcctttggtcatccctcaaggtcctgacttggatgccagactgagcctggaccgccatcctctgccgattgtgtttgctcccctcagaccaagtctctgactctgagtcggcccgaagtggcattggggggaggggtgtgctcggggtgagatcattgccagtgtgtaccagggctgacaagaggggctgagctggattctgtggtcccactatgtgggtgagggtggatcctcagtcctcactcaggagggtcctcttcctcactcctggctgtttgatgaaggaatgggtgggagatgctctgtttctgtcacctctgagcatctgcgcatctgcgcatctgcaccccttgtagagaatggctgcgggtgccaggccaggtgctccctgcagggcaggagctcccgcgatgatagtgacctctgggagaagacgcaca

SEQ ID NO: 42866 - DNA, 1057 bp, Artificial sequence
  DNA replication origin
atgggaatcggggtttgggggtcccgttgatgtttgagcgatggtggtgggtttggtgttgggggatgggggtggggttggtgttgggggatgggaatggtggtgggggtgcggggggttaccctcagtcccctcttggggtcctgaccttgattcctggctgagtctgggccctgagcacttctaaccagccctgccctggtcacacaaagctcttacaccagagttccctgcggttaaagcggcggggggtggcggggtgaggtggtggcgactcagcctgagaagtcttcccctgcagggtggtccaggcccggcagcagaggcagcgctggattattgggggccctctgtctggggtgaggcccgcctcagtcctccctcggcatcttaccttgcctcctcacggagcctgcgcctgcttccctccaccgacgtcaggccgttgctcagggcgagaatctcgctgttctctgacctccaacgcgcaagtcagtggcgtcacatccggccccgtgacttccctgggttcacagcaggggtggaactggattcttcctggatggggatccagatggaggtggaggtaagcatgaagatggtgttgggggtaggggtagggatagggacggggatcctgaggctgtagatcctggtggggttgggggagttgggggtgggaggggcctttggtcatccctcaaggtcctgacttggatgccaggctgagcctggaccgccatcctctgccgattgtgtctgctcccctcagaccaagtctctgactctgagtccccctgaagtggcactgggggaggggtgtggtcggggtgacattattgcctaagtttaccagggctgacaagagggactgagctggattctgtggtcccactacgtgggggagggtggaccctcagtcctcactcaagagggtcctcttcctcactcctggctgttggatgaagtgattggcaggagatactctgtttctgtaacgtctgtgcatttgcacagctgcaccccttgtagagaatggctgcgggtcccaggccag

SEQ ID NO: 42867 - DNA, 820 bp, Artificial sequence
  DNA replication origin
tgccactgatctggactccaaggtcccctcagtcctccctcttcttcctccccttgactcctcgcagggctgggctccaactccctgctgaagtgggtctgtatccctaggattcccgcggccgaatgaaaaggtggctcagtttgagacaggggtactttgggcccctgtcctggcatgctgggagccctccggactccattatcttccaggaggggcttgggcccatcctctgcttcccaaaggccgtactcacgataccgacccccttccctccctgagccacagatgtgaacgtcaggatccgcgtgcttggccgccattcccggagcttccgtgggttgattgcaggggcaaagctccgattctgccaggatgggtggggatgggaatcggggtttgggggtcccgttgatgtttgagcgatggtggtgggtttggtgttgggggatgggggtggggttggtgttgggggatgggaatggtggtgggggtgcggggggttaccctcagtcccctcttggggtcctgaccttgattcctggctgagtctgggccctgagcacttctaaccagccctgccctggtcacacaaagctcttacaccagagttccctgcggttaaagcggcggggggtggcggggtgaggtggtggcgactcagcctgagaagtcttcccctgcagggtggtccaggcccggcagcagaggcagcgctggattattgggggccctctgtctggggtgaggcccgcctcagtcctccctcggcatcttaccttgcctcctcacggagcctgcgcctgcttccctccaccga

SEQ ID NO: 42868 - DNA, 1515 bp, Artificial sequence
  DNA replication origin
acattcggccactgtgcccaggatcccccagcccaaggttgccactgatctggactccaaggtcccctcagtcctccctcttcttcctccccttgactcctcgcagggctgggccccaaccccctgctgaagtgggtctgcatccctaggattcccgcggctgaatgaaaaggtggctcagtttgagacaggggtacagtgggccccctgtcctggcatgctgggtcccctaaggactccactgtcttccaggagggcctgggcccttcctctgcatcccaaaggccatactcacgagacccaaccccttccctcccttagccgtacatgtgaacgtcaggatccgcgtgcttggccgccattcccggagcttccgtgggttgattgcaggggcaaagcccggattctgccaggatggtggtgggggaggagatgggaatggggtttgggggtggggttggtgtttgagggatgggggtggggttggtgttgggggatgggattggtagtgagggtagggggtgggttgccctcagtcccctcttggggtcctgaccttgattcctggctgagtctgggccctgagcacttctaaccagccctgccctggtcacacaaagctcttacgccagagttccctgcggttaaagcggcggggggtggcggggtgaggtggtggcgactcagcctgagaagtcttcccctgcagggtggtccaggcccggcagcagaggcagcgctggattattgggggccctctgtctggggtgaggcccgcctcagtcctccctcggcgtcttaccttgcctcctcacggagcctgcgcctgcttccctccgccgacgtcaggccgttgctcagggcgagaatctcgctgtcctctgacctccaatgcgcaagtcagtggcgtcacatccgggcccgtgacttccctgggttcacggcaagggtggaaccggattctgcccggatggggatctggatgggggggtgggggtaagcatgaagatggtgttggtgtaggggtagggattgggacggggatcctgaggctgtagatcctggtggggtcgggggagttgggggtgggaggggcctttggtcatccctcaaggtcctgacttggatgccagactgagcctggaccgccatcctctgccgattgtgtttgctcccctcagaccaagtctctgactctgagtcggcccgaagtggcattggggggaggggtgtgctcggggtgagatcattgccagtgtgtaccagggctgacaagaggggctgagctggattctgtggtcccactatgtgggtgagggtggatcctcagtcctcactcaggagggtcctcttcctcactcctggctgtttgatgaaggaatgggtgggagatgctctgtttctgtcacctctgagcatctgcgcatctgcgcatctgcaccccttgtagagaatggctgcgggtgccaggccaggtgctccctgcagggcaggagctcccgcgatgatagtgac

SEQ ID NO: 42869 - DNA, 1476 bp, Artificial sequence
  DNA replication origin
gaaggcgcaatgagcacagagcacatttggccactgtgcccagcatcccccagcccaaggttgccactgatctggactccaaggtcccctcagtcctccctcttcttcctccccatgactcctcgcagggctgggccccaaccccctgctgaagtgggtctgcatccctaggattcccgtagccgaatgaaaaggtgcctcggtttgagacaggggtacagtgggccccctgtcctggcatgctgggtcccctcaggactccactgtcttccaggagggcctgggccctttcgctgcctcccaacggccatactcgcgataccgaaccccttccctcccttagccgtagatgtgaacctcaggactcacgtgcctggccgccattcccggagcttccgtgacttgataccaggggcaaagcccggattctgccaggataggggtgggggtggggatgggaatggggaatgggggatgggggtggggttggtgttgggggacgggaatggtggtgagggtggtggttaggctgccctcagttccctctcggggtcctgaccttgattcctgccacagcgtgggccctgacctcttctaaccagccctgccctggccacattaagctctgtccccagagttccccgtggctaaagcggcgggggtcggcggggtgaggtagtggcgacccagcctggaagtcttcccctgcggggtggcccaggcccggcagcagaggcagcactggattatttgaggccctctgtctgaggtgaggcccgcctcagtcctccctcagcgtcttaccttgcctcctcaccgagcctgggccggcttccctccgccgacgtcaggccgtcgctcgttgctcagggcgagaatctcgcggtcttctgacctccaatgcgcaagtcagtggcgtcacatcctggcaacggtactaccctgggttccgggcaggggtggaactggattctgcctggatggggatcggatgggggtggaggtaagcatgaagatggtgatggggcaaggggtaaggattgggacgggggtcctgaggctgtagatcctggtggggtcgggggagttgggggtgggtgggcggggccttcggtcatccctcagggtcctgaagttgatgcctggctgagcctggaccgccatcctctgcagattgcttctgctcccctcagaccaagtctctgactctgagtccccctgaagtggcattgggggaaggggtgtggtctgggtgacatcactgcctgcgtttaccagggctgacaagaggggctgagctggattctgtggtccctctatggtgtgtggggtgggggggcggtgtggaccctcagtcctcactcaggagggtcgttttcgtcacctctggctgttggatgaagtgatgggcaggagatgctctgtttctgtcacctgtgagcatttgcacagctgcaccccttgtagagaatgcct

SEQ ID NO: 42870 - DNA, 956 bp, Artificial sequence
  DNA replication origin
gagggtcctgaacgtgatggctggcagagcctggctgctgccctctcctaggcagccctgccctgatcacaccaacctctgactccagagtcccctgaggcttaagtggcagagagttgggggcggcccagcctgagaagtccgcccccgggtggtcctgggttggcagcaggggtggtgctggattttttagggtcctctatcttgggttgcaacggggtgtccctagtcctccctcaacgcctcacctttccttcacacacagcccgggcccgctttcctccgccgatcttaagccacccctcaaaaccaggccctcgcttccctctgatccctgaggcgcaaatcagtggcatcacatccgggcacccggggcttccctgcgttgacagcaggggcaaaacctgattctgtcggggtgggggtggggatgggaatgggaatggaggaggggtgggggcgaggatgggggtgaagatggggatggggatggggatcctgaggctgtaggtcgtggcggtgacggtgggcttgggggtgagggaggccctcagtcgttcctcagggtcctcaccttgaaacctggcagaacctgggccctgccctctcctaaccacccctgccttggtcacaccaagctctgactccagagtcccctgtggcataagcggcgggggttggcagggcgccggggggtggcccagactgagaagtactcccctaggtggtccagggctggcagcaggggtgacgctgaattatttggggtcctctatctggggtggaggcgtcctcagtcctccctcagcctctcaccttgtcttctcacagagcctgggtccacttccctctgccaatctcaagccgcccctcagaccgagaccctcgcttctctgaccccctagccgtcacatccggccaccaagcctggggcttccttgggttgactgctggtg

SEQ ID NO: 42871 - DNA, 925 bp, Artificial sequence
  DNA replication origin
ctctcctaaccacccctgccttggtcacaccaagctctgactccagagtcccctgtggcataagcggcgggggttggcagggcgccggggggtggcccagactgagaagtactcccctaggtggtccagggctggcagcaggggtgacgctgaattatttggggtcctctatctggggtggaggcgtcctcagtcctccctcagcctctcaccttgtcttctcacagagcctgggtccacttccctctgccaatctcaagccgcccctcagaccgagaccctcgcttctctgaccccctagccgtcacatccggccaccaagcctggggcttccttgggttgactgctggtgtcatagcggattctgctatgagtgggggtggaaatgggggtgggggtggggggtcgaggtcgagggggtgggcactctcagtcatcctcaaggtcctgaccttgatgcctggcagagcctggatcccatcctgtgtggatggtgtctgctcccctcagaccaaagcactgactccgagtcccctgaggtggcagtggagggagggatatggtcggggcgacaacattgtcagggtcttccagggctgacaggaggggctgaactggattctgtggtccctctatgtggggtgagtggaccctcaatccttactcaggagggttctcctcttggctcctggctctttgatgaagtgatgggtgggggatgctctgtttctgtcacctctgagtattcgcccagctgtaccccttgcagagaatggctgcgggtcccaggccaggtgctccctggggagctgcagtgcctgcgattgtagtggcctctgggagaagacacacaccttcccacgggggctcctccccagccagaagtcgacttgtcaaaccttttgtcctaaagcatttattttta

SEQ ID NO: 42872 - DNA, 2840 bp, Artificial sequence
  DNA replication origin
taacccaggaacaggaaaccaaacaccacttgttctcactcgtgagtgggagctgaacagagagaacacgtagttacagggaaggggacaatatacataggggcctgtcggtggcagtgggggtgggggtgtggggggagggagaacatcaggataaatagctaatgcatgtggggcttaacacctaggtgatgggttgataggtgcagcaaaccaccgtggcacacgtttacctatgcaaccagcacgtcctgcacatgtatcccggaacttaacttaaaaaaaaaaaaacagtttcagggataaggaaaaaaaagttaattaaaaagaagttttgaaattgacaacattgtatatatttatggtgtacaatatgatgttttgaaagatgtatacattgttgaatggctaaattaagctaatggactatcctggagacattcttatctcctcctgcttaatattcccataaatgaaatctctcaggaatctcttgagacaggacggagagtggcaagtaataggttatccctgaggataaaagcaaacataaggtctttgcctggcagccattctaacataggtgtgcagttattcagtggaaggatggggacagagagggagcatgagtcagtggggctggaccggagagctgtaaagggatcaggaagatggggacggagagggagcatgagtcagtggggctggaccagagagctgtaaagggatcaggaagatggggaaggagagggagctgggctcagttcatgtggaggcagaaaagagtcctgaaggcgggggaggatgtggatggagaagtaactgaggtcagttcacgtggggctggaccaagagatgaagggaaattgcagaggatagggacagagaagtagaaaagatccgtgcatggggtgtcccggagaggtgcaggggagcaggggtagggggaagggagtgagagggagcagggatcagttcatgtgaggatgcagctgagttttcatgggagtgtcagtgggtgggtttgtagagttagtggcttattcatgtggacaatagagttgtgagggagtgaggggaaatgacagttcatgtggggctggcccaggaagctggagggggatgaagtggcgatgcacacttagagggagcagatgtcagttcatgtaggctgtaccaagagatgcagaaggctgaatgggatggcatgggagaggcattcgaggccagctcctgtgcagctgcactggagagatgcagagcgtcagagagggaaaggaaaagccactgaggacagcttatgtgtggctgtatctgcagaggtagccggagtgtggggcaagggaaaggagagggaacggagcttagttcacgtgtggctggaccagagatgtatggtggggaaggggaaggaaaggagatggagctgagttcatgtcatggagggctggaccagagagatgtagggagagtgactgggtaagttctaaggggtgtgaaggtggcatatgattgcataaagacatatactattggagaggagtgaaaagactgggccctgcctcccattttgttgttagggagggagaggcagggtgagtgggttcaaataccggtcatttcagagctgcaggggacaggcagggagacagaggtagcaggggtcagcccttgcgggtggaccagagagatggaggagtggggtgggtttggaatggagaggtaacagaggtcagttcatgtgggactggaccagaaggacactggggagtgggagaagatcagaagtaaagggactgaggtcagttcatgcagcgtgggacggaccaatgtagggaggtggtggggaaggggcaggagagaaagcagagggcagttcatgtggggctggaccaaagaaatgtcggttgcgtgtagggattgggctggagagagggcaaagattcattcatgtgcagctgcggcagagggcagtagtgcaatggggggagacagggcacaggagagagcagagagcagttcatgcggggttggactggagagctgcaggagggtgggggtggaattttgaactagagaggtcagagattgcttcatgtgaggttgaactaaaaagttcaatcagagttggagaaaaaggggaggaagagggagcaggggttccttcatgtggggctggaccagagggatgccagaggagttgagggggatggaaaagtagagggagcagagattagttcatgcaaagatggagcaaacaggtgcaaaggcttagagacatagggagcaagagaggtcatctcacaatggactgggtactgggaaggagattgagcccagagttagttcatgtggggctggaccagagaggtagagggggatgggggggataaggggatggggatggagagagagcagaggtcagttgatatggggttggactagagagatctggcgggatggtggagagggctagggaatgcaggccagttccctgaggatggaccagagagccggaggggaggaagggtagggggacggagagggagaatagtcagtttgtgtttggtcttgtgggcctccttaataacttagggttgtgctaaatttccttgaaaaacctgtccagcagattcgtcttttctttgcttccaagtgttagaactactgtgaacagcagaatttgttggtagacatgctcaagcctgatataacgaaatgatttaagaaaggaggtggttcagtttctgtctctgtaagacatggaacagctgctgggactgagatttttttaagttctatgatgaccgggaagagaagaaagaacacattttttacca

SEQ ID NO: 42873 - DNA, 966 bp, Artificial sequence
  DNA replication origin
tggagttcagtgggtgcagcctgcttgcgagctgaggccagacaggggggcgcctacggacgggtaagagtcgtggccttgccattggaggtcaccctgtgtcagcgactgggcagtgcgggagggtggggagctacggggtcgcccgggtcgggtgctttctgggttgacctaaggctgagtttagggaccgagtgcatcagagcagccagaaacgattaccttgcgtgttggagcagggactgtactcacggggcaactgagacccggagaggggaaggggtgtgctgagtgttgtcgcagaggtcggacggctgggacctaggaactgaatccagccgaggctcgctctttgagggtggcccttcgagagcacccctagactgacccagatgtataggccccagaccaggttccaagagaggatcactttagatcttacctggctaaaagcagcccaggacggtgaactggggcctttgggaacggactttgaaaggagtgagggggatgtgagcgagcatgaggggcggggagaggtcatcaaaatatactctttttgacacccacacaatgcagataaggaggagcattccaggccgagacgccctcatcagcagagtcacaggagttttggaagtgagaggtatgcttggagaattaaaagggagcgtgtgcaagggctgtggactgacatagacctgcagaagtggagctggaggtccagtttgccctctttagctatccccgtggcttttagccttcacctgtttttcctccaggcataggggcagtaatctagggagacagagggcagagagtaagtttctcagacagagaaaggcccgaggcttattagaaccttttaaatggagctgctgccctttgccctcttctctcttcagcagtgaacagattcctgacttttgggtcatcatcatccccccaagtagtacgagccagagt

SEQ ID NO: 42874 - DNA, 1363 bp, Artificial sequence
  DNA replication origin
gaagaggactgggacccagacaaagagtatgacacagcctaagtcatacagtaaacatgtttaggaggtaagatgccaagccaaatccatggccaccagtagccacagtggaggaggggaggtgttagttgctggccaccagacaggggcatacaatattggaagcagaaaaatgcttgttggcaagagacggacatgaacagaagtgactttatatacaaccccctaagcacacacagggtcgccttctccctatctcatgaaccccaagaagaaaaggatgaggacagcttccacagcctcactcacccatccatcacttccttctgcaaattcttcggatgccctgtgctggtctccgtgacccagtgatgaatcagaaggggccctgccctcccagagctcaggatctagaacaatagagggtgacagccactatgctggattgatgtcatctgagggaactaaggggtgcacagaaggaagtgatcagctcgactgggtggcaggcaggggaggctttccggacactgggtggaggcttgaagaatgactaagagctcactagcccgacggggatgaagagcattttagggagtccgaggagcaggagcaaacaccccaaggtgagcgccatgtgatgtattcagaaggcaatggaaaaaggccagtgtggctgtaatgtattgaacaaagggaagagtggctggacctgcagggataggtcgtctcaaggagtctggcttttaccctgagagcaatgggaagccatggaggagttgcaagcaggagagcacctgatcatattgacacacgtgaacttttaacctgacctccgtgtagagactgagggaaaggaaggcaagaccagaggcagggggacaccagcaaggaggctggtcttcggggccaggtctggactagggtggtggcagcaggcacagggagaagtgggtggactggagggccatggaaacaccacattggcaggccttgatgaaggagaagcagctggtccattcttttgagcctaccaccctggtaggccaactcctggccaagtccatgccatttcttgggctggcttaattgtctccctgtttgggaggccgtggggtgaggggtctttcctccatgctctctccatccttagccccagcccagggccttgcacacaataaagcactcggtgagcaccaacgcgtgacacaggtacatcaaaccgcattggctctgggagtctggctgtatctcgtcgcccagcctgggagatagccccgtttgctgtgccttgtgagccccgggtccgtcccaggatggccttccacgatgagcggctccctcactcttctcctcctttcct

SEQ ID NO: 42875 - DNA, 1832 bp, Artificial sequence
  DNA replication origin
ccacgggcccggaggaatttgcctggaagttttccatcacggcagagccttctggagctcgccccgtgctcgacaaggggagccccagacttgatttctccagcagccccgcggggcggggccgagaaggggcgggcgggcggaggacgctggcgggagaatgtgcggaatgtgccaggcgcctctacctaccccaggaggggcagaggaaggggccggccgaggggaggggcgaggggcgaggctccgggcggccggagaaaacctgtttgttctcctgcgggcggagcccagtccgcgcctcctcgcctccctgcgcgctccccgctgtgcaccgcgccccgcgccccgcgcctgcctccccggcccggcccggcccggccgggcgccgtccacccgagggagcccgcgccctgcgactgcccgaccctccacccgccccacgagccgggcaccggtgccaggtagggctgtcgagtcgccattggatgcggccctgcttggaggcagtggggggcacccagtccgtgcccagctggggacaagtcagggcctcagtttccccatccataacccttaccagctccaagcatctctcttcgggttccccccgggagtcagtggatttctggttttcgctgtgagtgaaaagactgacaggcagaggaggccagcgtcccctacagaggcaagtgtcccccttgccagcctgatccctctgtcttgccctttaggaaagacacggtttaattgttagtaaacggcgaggggccaggatgctctgagagttgactgcaggcctttaagaatcagggaatctcatatccctccgtccccctgtgcccattttatagatgaggaaactgagacccagaggctggctcacccagaggatcccctcaatcgccctggggcctgtgaggtgcatgtgctgggtacagggcaatcttggggagggccatgaggatggtggctgctcacactcagacagaaggcgccgaatcaggtgtcactgggtgttatcgacaggatcggcactgcaccagctctgtggctggattgttttgatgggggcagagggagccaagagtctgtcctctttggaaaggcagagggataccttgccttacaaaaaggccgaaagctcaggtgctcctgcctgatctgccacttctgagctggggacacctgggtactctgtcggtttaagggggtgacacgtcaagctgcctcccacccagggctgctggggactcagataaagtaggtggtgggtgtgtcccggctttgggacatctgaggcatggtaggagttgtgttcttgctgagccgtcggcacgaagccttggcatcatgggaggccccaaagctgtgagccccgagagagggcctctcacaccccatccagcagtgcttgaggcttcagtacctggactaagtcctgccttggtctcatggcccttcagacttctggctgtcgtacctggctgggggcgggaggcaggggtgcacaggttgataggcctgaacagagctgcagaggtcctgccttcccagggcctccgctcctcatctgaaaaacaaggggcagctcagaggccagcaagtggccaagacacagatgcacagatgaggggccagccttctggcaggccttggtgcctccgctgttcccctcatcgctcccaggccacttcaggatgggaaggaacagatccctctcacctgcccctccttccagcaattcccagcccctggctggatgctgtgcattcagccgtgtggagctgatggaaggcactcagtgcagggccagacacgcagcaggtgct

SEQ ID NO: 42876 - DNA, 800 bp, Artificial sequence
  DNA replication origin
gactaggtcagtttcccagagagcttgatgtggcgaagagttgctatggagagagcaagcacaaggattttaatcacaagaaccggcatccctggtgaaaatgcttacatcaggcagtgcctgctttaaactgaaataaaaataaaaataaaaataaaacccaaaaccccaaaccaggacttgcttcaccacttgtgccagcgatcccttactcatgctttcattcctttgggcctgagcctgggcacctccttgggaaatgcagtgctctggcaacattccgctaggccgatccccccagcacccagcctggcggttagggctctgaaaatgcttgttgcatacatggcagtgtgatcctgggcaagtgctttcttctctctggacttccttattcttatccaaaaataggggcagtgttagaggtaagggtggggttgaggggactctgggtctagagtgggcagaaagatgagaaagagggttgtgggaggggagaaggaggatagggagtcagagctttgggggaagtggggaggcagcgggctctttctgttccttttgctcctaactagtgatcacctgcatctaggacagaaggaattagctttggctgatgttagtcaagggcaagaaggagtgacttcctgtcactggcctgctctggcaaagactgaatggatggcagcagtggtgtgtgtgtaggcgggggtgttcctaggggagagcgaaagagggtaaaagaaagtggccgagtgcggtggctcacgcctgtaatcccagcactttgggaggctgag

SEQ ID NO: 42877 - DNA, 889 bp, Artificial sequence
  DNA replication origin
gaagtgtaaggcagttctttgggacaaggagcctttaaagtgatgagtgtcaggcagtgggatggggtgggatgggatgggtgggatggatgggatggatgggatgggatagacggatcagatgggatagatgggatggatgggatgggatggatgggatgggatggacggatcagatgggatggatgggatgggatgggatgaatgggatgggatgggatggatgggatggatggatggaatgggatgggatgggatggatgggatgggatggatggatggaatgggatgggatggatgggatgggatgggatgggatgagatggatgggatgggatgggatgggatggatgtgatgggatgggatgggatgggatgggatgggatggatgggatgggatgagatgtagtggggtgggatgggagggatgggatgggatgggatgggatgggatgggatgggatggggcggggtggggtgggtggggtgggcaaatgaggttggaatctacatcccatctacagagctgacttctccctccaatttgccctggtctaggccacgatcccttgagacctcctccctggtccctggcctgctgcctttatctgcacctcctccaggcaacactcattggtctctaatcccacttggcccacatcagccttcaattctcagtcagcacctgatggttccacactgtttctaagactgggagcaaaatcaccagtcccctgagccagcctctttccccccaatgccgacactgtgctccaagcagaccatgtgccttggagtccctggaaggtagccctgccaagtgaatgcctgtgccttagcttatactggtccgcccacctgaaatgcccttccaacttccgccgagct

SEQ ID NO: 42878 - DNA, 1265 bp, Artificial sequence
  DNA replication origin
gcccccagaccatacagggaggcttacccccattagtgaaacgcaggcggctgttaggcagtgaaagcactaggggagaagaccatggccaggccacgtatcccaaggctgaaaaccagactccaggcagggaggggccacaggctgcaggagaggagttgggaaacgaggcaggggctggggccatgagccatcccaagccctgggaaacataggctcagaagaccgaagcactccttcccctggcaggcagcagggacatttgaacaaggggaaggggcagcttacactaacagggaacttgactggggcagagggacagggaagccaggtcgagatcaagcccccttactttccaccagctggaagggacttcaccaaccaagaccaaatagcatctggttcagtgggggccgggcccatagcccctaacaggtacaggagacacaagcggggaaccactacacttagcacatggggtgcctgggcttcagatggggaccccagcgaagcaggggctgaagaaggtgtggctgggggctctggcctggtcctctggacacccccaaatatctaccctgtggactttgagctgagcatgcccactggcacccaggccacgtgggacctggaggagcctgcctggggcctgcctctgccagaaggagccagggctgctgaggaagagctgtggggcagaagtgaagccccgcaggggaggccacagggtccagcctgtctttaggatcatctacactgcatgaggggagccccaggaaggcagcattcataagcccctgcaccagtgaggaagagaaagaggaggagaattaagaagaggatgatcgggaggaggaagaggagaataaggaggagcaggaggaagagggggaggagaaggaggaagagggggaggaggaagaggggaaggaggaggaagaagtgtaagaagagaagagaggatgtgttgggggtgggtagttgtttttggtttgcgtcatcatcaggcccgggctctgctcactgctgttccgtgtcaagaactccacctctgctttgccggtgtagatctcggccagtggctgcttgttctcttggggatgtgtgtgtttttatctgagcagctcctttccagagtaccccagcgcagttccaggagacggtgggaaggaggcatggcagacgctcaccttgtgactgtgacctcgactgcaggaggaccaaccagacacgggaaggagcagggctgcctgaggctccccagg

SEQ ID NO: 42879 - DNA, 833 bp, Artificial sequence
  DNA replication origin
gaacttcagggagacctggccgggcgcggtggctcacacctgtaatcccagcactttgggaggccgaggcgggtggatcacctgaggtcaggagttggagaccagcctggccaacatggggaaaccccgtttctactaaaaatacaaaaagtagccgggcgtggtggtgtacgcctgtaatcccagctactcaggaggctgaggccggagaatcacttgaacccagggggcggaggttgcagtgagccgagatacgctactgcactccagcctgggtgacaaagccagactccgtttcagagaaaaacaaacaaacttcagggagacctattccacccttgacctgcccggagacactgcagtcaggatagtagctcttggcccttgcccttgagggaaagtggcttcgaaccttcccctcctagattctgcctgcttccactgatgtcggtggtgtgggtgtatgtagataaccgggtggggattggggggagcaggggaatggaggtaggggatttggggatatcagttagacttgcctcggggtaggagttggacttggtgagggggcagggcttggggtaggagttggactgtgggtgggggcagggcttgaggcacgagttagacttgggtggtggaaggggttagacttggtggggggctaagcttggggtagaggtgcaacttagttataggcagagtttggcagcaggggtgcaggttttgaggtggggcttaggaagggttgcaacatggctgtaggggcggagcttgggagggaatggagtttgcagtgggggtagggcagcaaccttaccttaggatccctt

SEQ ID NO: 42880 - DNA, 2087 bp, Artificial sequence
  DNA replication origin
gggcctgttgcccccggaggcacatcaagcccttaccgcgcaggtcccgatcccagggcaacacggatgcctccccctgtttagctatttgcctcccacagagactctgagatttttctccctcatctatctgaggcttctgggagaagttggaagcccacgtgcccttagtacagctggcctgagatatccctgccctgtgcagtcccagatgggctgctggggcgcgatcttccaccttcccattccagggcctcaaggcggcctccagagtgggctccacagcctgaaggtggcatttccccgtgggtggttgcagtgtctgcagacagtgagcaggcaccagcgggaccccagagtggctgagggcacactgggcaggagccagatcgctgtccccccaggcagtaggtgcgacagcgggtcctggtctggagcctgaggagaggggaggagggtctccttgctgcaggagtctgggtggggtgagctcctggctgcagggcacctctggctacagaaggggacgatgggagagagaggggctctggctgtgggggaaggggactcctggctgctgatgtgggaggcgtgggagggggttgccaggttgcagggaggatggcattagggagagggctcctggtcaagtgctgggaaaaagaggaggtgggcacatccagctgcagggttgcacatgatggttggaggggctccagctgtaagttttgtgatcaggggctgttcaccaggtgaaagaggcgcttcctgctgtggaggtggggggtgcagtgaaggactctgagctgcagcagtaggggtgggggagcatgggctgtgacactgggcaggggagatgcttcaggccctgcatttgggagtggctggtctctggctgtgcggtgggggtgggctgactggcagcaacgtccctctctcccctttgcactcacaggctgcgtcagagactgcaacagtcagcacacattcctgtctgatcaggctccctccctcaagtcctctgcgatggctctggcgatgcttcgggactggtgcaggaggatgggtgtgaacgcagagcgctctctgctcatcctggatatccctgacgactgcgaggaacatgagttccaggaggccgtgcgggctgccctgtcgcccctgggcaggtaccgagtgctcatcaaggtcttcagaaaggagctcggggccagggcagccttggtggaattcgctgagggtttaaaccaaagcttgattccccgccaaatagcaggcaaagggggaccctggaaagtgatctccctgccccaggcccttgatgctgagtttcaggatatacccagtttccctgcatagccccaggggcaagcagtggccagaggtgcaggtgaggcaggagctgcaggtgaggcaggatctgtaggtgaggcaggaggtgtgaatgaggaaagatctgcaggtgaggcaggagctgcaggtgaggaagaagaggcaggtgatggaggagctgcaggtgcagcaggagccataggtgaaacaggagctgtgggtaagggtgaggcagaagccacaggtgagggaggatctgcaagtgaggcagaaggtgcaggtgagggaggagctggagatgagttgagagttgcagaagaggcaagagagtcagatgagggagccgcaggtgatacaggacctgcaggtgaggcaggagctgtgggtgaggcaggagctgtgggtgaggcaggagctgcgggtgaggcaggagctgtgggtgaggcaagagggacaaatgtaacaagagcctgggtccagcctcggcgctgcaccctgcaggctgtgctggaaaacagggcctaccaggaactgagacccttttcagggagggagcagccaggctgcgaggaagagtcctttgagagctggatggagcacgccaaggatatgctgcagctgtggtaccatgcgtcggaaagggagaggaagagatggctgctggagagcttgggtggcccagccctggacgttgtgagcggcctcctagaggaagatcccaacttggcggcactggactgccaggcgctgctgga

SEQ ID NO: 42881 - DNA, 1188 bp, Artificial sequence
  DNA replication origin
cgggggctatgcgcggcggcggcggcggcggcggacgggggtcgggcacccctggctcccagcgcggacgttcgctcagactgtggctctccctcgctcgcgcagcacgtgggccagtgcgccggcgcctgctcgccgcggctctctgcagtgcggacacggggcgggggcgcggcggcggtgcagcgcggacccctccgcgtcgtccgggagaccgcagggccattggcgcggacgggtcacgaggtcgggctctcgccgccgcccctgggggccccaggtccccgggtgacgtcacctgctcctctcccctagcccccccgccacgggggcccccgggcccccgggcacacaagcgcccgcccacccccatccccactgcggtggccaaaggtctgtggcggccagtccccgtgcctttggctctcaccacagcggttcctggtcccggctcctgcccctcccgcacgtgccacggaggtgccagcggggcgaggggtctgcaccccggcgtgcccaccagagggccagggagtggtctgaggtgcgccaggcagctctgcattatggccagggtcagggagccgggttctggggcctgttcacctgctcttgtcctccccctccccgtccaggactggtcctctggctggcgaggccaggggcacctggtgcgggtgccattccgtgcaggagatgccccaggcactcatgcaggtcacgcacaccaccccaaggagggtcagccatctccccgctgtccatcccgctgctgggacctgaggccctccggccaaagcgcttcgctgcccaggtgccagtggacaggtttaccgggacctttccggttttgtgcgctgcaaatctagtgacttgggaaaccacttccaggacttggagcccaatcccttgggcctgcccttccttggcagccgtgcgccgtgggttctattgtatccgtttgatcccagggcagcagccaaatgaagaagggagtgactgtccctcaggcagtgggcccaggtgttctgtgggtcctgcctgctctgccagccgcatgctcaactcctattcacacagcttcagctcctctccaaacacaacgaaaaggggcttgtggttgattttcaggccaggttcacccatccagccaagtctgggaggccaccttgcagtgagtggggcaca

SEQ ID NO: 42882 - DNA, 1578 bp, Artificial sequence
  DNA replication origin
gggtccgcgctgcaccgccgccgcgcccccgccccgtgtccgcactgcagagagccgcggcgagcaggcgccggcgcactggcccacgtgctgcgcgagcgagggagagccacagtctgagcgaacgtccgcgctgggagccaggggtgcccgacccccgtccgccgccgccgccgccgccgcgcatagcccccggagagccctctggggaccccgaccagaagggaccttgccctgggagaaggtaacagacccacctggggagggagacgctgggccccgggagactccgccgcccctcgcctgtccgccctatcagaactgaagcagcctgcagggcaggggtccagggtcctggggcagcgcggggagggggctgaggcccgcagagaccccacggggggtgggggtggggggctgggcaggggcggggcctggctgcagaggcgccgcccggggaggagggcggctgggggtgggggtgggggtgggcgtggatgtgggcgtgcggagaggtgggcattaacctcgctctcgccctgctcgcattcacaggctgtggagacctgggccttctgcgatcaccctaggagttgatccagatatgtgcctcacgccctgatcactccccccaaattagtatccgcagagattcgaggacatgccgttgaccttgttacaggactggtgtcggggggaacacctgaacacccggaggtgcatgctcatcctggggatccccgaggactgtggcgaggatgagtttgaggagacactccaggaggcttgcaggcacctgggcagatacagggtgattggcaggatgtttaggagggaggagaacgcccaggcgattctactggagctggcacaagatatcgactatgctttgctcccaagggaaataccaggaaagggggggccctgggaagtgattgtaaaaccccgtaactcagatggggaatttctcaacagactgaaccgcttcttagaggaggagaggcggaccgtgtcagatatgaaccgagtcctcgggtcggacaccaattgttcggctccaagagtgactatatcaccagagttctggacctgggcccagactctgggggcagcagtgcagcctctgctagaacaaatgttgtaccgagaactaagagtgttttctgggaacaccatatccatcccaggtgcactggcctttgatgcctggcttgagcacaccactgagatgctacagatgtggcaggtgcccgagggggaaaagaggcggaggctgatggaatgcttacggggccctgctctccaggtggtcagtgggctccgggccagcaatgcttccataactgtggaggagtgcctggctgccttgcagcaggtgttcggacctgtggagagccataaaattgcccaggtgaagttgtgtaaagcctatcaggaggcaggagagaaagtatctagctttgtgttacgtttggaacccctgctccaaagagctgtagaaaacaatgtggtatcacgtagaaacgtgaatcagactcgcctgaaacgagtcttaagtggggccacccttcctgacaa

SEQ ID NO: 42883 - DNA, 1576 bp, Artificial sequence
  DNA replication origin
tgccttgatcttgggcttcccagcctccggaattgggaacaagaaatttctgttcttttgtaagtttcccagtctccagtgccttgactttgagcttcccagcccccagaattgggagcaatacatttctgttctttgcaagttacccagtctcaggtattttgctatagcagtgcaaatgggctagacacacaggcaagtccactccaccttctggggctctagcttgccacctggggagggagcccctgatacccaaaagcaaagactcagaccagcatttctcacgtgccgacacatgtactgatgccgccaataagaatataaaccgagggcacgtgatttgtgtgtcccagcagagggggcctatgggaggaggggacagttcagctgagacatgaaggaggaggaggtgcaggaggagggggaggaggaggaataggaggaggaggaggaggagggagaggaagagcaggaggaagctgctgccacagaaggttcttgggcctggatggctcacacagaggaaggagggatggcaaaggccgaaggtgggaacaagccctgtgctttggggccagctgaacaggccagatcggcaggaatgtggtgagaggagctgggggcatggcaacatggggtggatttcggggaaggaaggagagcatcagaggaagccagatccccaggagcagcgtggggggtgctcttgaccaggatggggactttgagattactctaaggagatggggtgccacagggaggagcagggtctggtggtgttgcaaaaagatcaccctggctgctgagggggtgttggtggagcagggaggaagcggagtggaggcagggagaacaggaggcagggcgggccaaggaccacggagatgagaagggtagcagtcttggagcagagtcaacaaaatccaatgatgggttagatttgggagtgaggaacaaaggagaggggagagaatcttggctgctttgtttgagtcaccaggtaggaggcagagccctttgcacagagggggaagcccggggacagtgtaggcatggtgaaggggacgaagccctccggtttgaacatcttagctctgaaatgtctgcggggcatccacgtgggcagatggatgggtacgtgcggagcttggaagagaggtcacgtccagagacagagcattcatcggaggtgccgtatgtcccagggttgaggctgggagcccgcccccaccacgcttagatccagcaaagtaggaggaggaggaggaaggtccaagggcagagaggcaggtagagagggaggaggtcagcccaaaagtggggtgggggagaggaagaagctgagaaaggaaatggttttgagaaggaaggagagtcaactgtgttgagaggtggagacaatggggacagaggactgacaaaagaaagacagttgacgtgtcacagcccagccttgcccggggttggcggggggcaatgggtgtcctgcagcgtcctggacttggagtcagcaggtgcagaaggaaggagagtgggaagagacaaggccgaaaacaggaaattagttgcgagc

SEQ ID NO: 42884 - DNA, 827 bp, Artificial sequence
  DNA replication origin
ggcgggggcggccgaggcggggggggggagggggggggggtcggtgccctttctgaagaaggactccagaaaaatcacggctgaaaacaagagagaggacaatatgtggtataagccgtgacaagtctaacactaaaggttcgatagacagacactctcacagcagaggtaaagagcagcagtttgcctgaatgagaacaagcagtcttggccctcaagggggagaagcggtggggggcaggggggcggggaggactggacacacgagcccaaccggggaggctgctttgtgacagaagacatgcgtttcttcgctgaccccacgtttactacctgggaggtagaaaagcctggggagcaagaccatgccaacctaagtaccacacagagagggagcctccctataagaatggtattcagaaataggcactgcagtggggacgcgtgcgccctagtgaactatgtgcatattcaggcaggggaaggcagacaaaggtttttcaggacaagtgaagaggattacataattgttttgacataatgatctttggctacaaggatgaataacaagggtagcattggtcaggggcttggacaggaagttgctgggcaggtgtcctcacagaagtattatttgtgtcaggttgcaacagcctttgtgcaaatttgtgggttttgcagtcttccgtgatagcttttgttatcaggcattcgtgcatgggaaccctgcctaggtggccctccacagctctatttgtcaggtttttggatttttgtttgcttgaacaacaagtgactccatcttgattctgaaacctttcacaacc

SEQ ID NO: 42885 - DNA, 1307 bp, Artificial sequence
  DNA replication origin
catctgcgagatgaggaggaaaggagcaaaggagattcacagaagaggaaccaggaacggccagtgagaggatgcacgacctcgccaccgctcggggaaacgcaaggcacacagcgatgaggtggtgtctctccccgtgggatgggcaagcaggcgaggctggacaggaccaaaggctgctcgggctgtaggaacccaggaccgctcccacgctgccagtgcgagggaacatgggttcagccacgcaccggaggtcacagatgagcaatgcttggttgtggcgttgataggcacagcccaagtcccagcagagccactgcctgctgtgcaccccagagtctttctggctgacggtggtggctcagacaggcatgcgggatgccactggcagcagtgtctgcaacagccaaacagtgggaaggaccggaatgtccatccccagggtcatagacaaatactctggggctgtgattcagcaaggagcttgggcgagctggacgcttgggggaaaccttggccagcaagttgccaaacaggaggtcaggcaaggaaagagaaggggatgagggaacgacacccagaggtgtgaccccgtgggaacctgtttgccacctgcctggtggagatgctgttcacatggccccagcctcccatgatgggtcaggtgcagggtggtcagatccacgggcgcagaatctctgttttgagcggaggctgctctgccctggcgcagtgtctagccccggcaacagaggactggggaaggacctatggaaggctgactcaggccctgacagacggaggtctccagggaggtacgacacccatgctgccctcagggccaagagagcaatgtcccagagcccatcaggctggtgagggcacagggggcaggggacaaattgagtagcccactccgcgcggactacctttccaggcacacactcaggcagagacccagactcgggacttgcggctgcaaaacggacgaggcccgggcatacttgggtgctgggtcaccctcctaggtgctggctcctggcaccagggcagcaaagtgcttcggccggagggctgcgggtccctgaagccggatgggcagcggggagatggcagaccctccgtaggatggtgtgcgtgagctgcgtgagcgcctggggcatctcctccacggaatggcacccgcaccaggtgcccctggcctcgcctggccttgccagccagaggaccagtcctggacggggagggggaggacaagagcaggtgcacaggccccagaacccggctccctgaccctggccagaacg

SEQ ID NO: 42886 - DNA, 1382 bp, Artificial sequence
  DNA replication origin
ctcccgggccggcgacgcggaggggtccgcgctgcaccgccgccgcaccccggccgcgtgaccgcactgcagagagcggctgcgagcaggcgcctgcgcaccggcccaaacgccgagcgagcgagggagaggcacagtcagagggaacgcccgcgcggggagccaggggcgcccgaccccgccgccgccgcagcggcgcgcagcccccgacgcgccctgtggggacccggaccaggagggaccctgccccgggaaaaggtatcagacccacccggggagggggacgctgggtcccgggagactccgccgcccctcgcctgtccgccctaacagaactgaagcagcctgcggggcagcggtccggggtccggggtccggggtccggggtccgggggcggcgcggggatgaggccaagacccgcagggaccacccccccgggggggcggggcgggacaggggcggggcctggctgcagaggcgcggccaggggaggagggcggctgggggtgggagtggacgtggacgtggacgtgggcgtggggaggggtgggcattaacctcgctctcgcccgctcgcattcacaggctgtggagacctgggctccgaccccagttcatccccccacacccccgccgccccgtgccaccctggtccgcgctgggaaccctatcctgcccctcgtgtcagcccggcactggccagaatcgcgggcatggcggtgaccatgctgcaggactggtgccggtggatgggggtcaacgctcgcaggggcctgctcatcctgggcatcccggaggactgtgatgatgccgaattccaagagtccctcgaggctgccctgaggcctatgggacactttacagtgctaggcaaagcgtttcgagaggaggataatgccaccgcggccctggtcgagctcgaccgggaagtcaactatgctttggtccccagggaaatccccggcactgggggcccgtggaacgtggtctttgtgccccgttgctcaggcgaggagtttctcggtctcggtcgcgtgttccacttcccggagcaagaggggcagatggtggagagcgtggccggcgccctgggtgtggggctgcgcagggtgtgctggctgcgatccatcggtcaggcggtccagccctgggtggaggccgtgaggtgccagagcctgggcgtgttttccgggagggaccagccagccccaggggaggagtcctttgaggtctggctagaccacaccaccgaaatgctgcatgtgtggcagggggtctcggaaagggagaggaggaggaggctgctggaaggcttgcgtgggaccgccctgcagctcgtgcacgcgctcctggcggagaaccccgccaggacggcgcagga

SEQ ID NO: 42887 - DNA, 1602 bp, Artificial sequence
  DNA replication origin
tgaggaagctgagaatggccgggaggtctccaagtttcttggagatgctggggctcgttcgggagtctgaggcatgggaggccagtctagccaggagcgtgagagcccagacacaggaaggggccggtgcccgggctggtgcccaggctgttgccagagccagcactaaagtagaggcggtcccaggaggtcctggtcgggagccagagggcctcctccaggcaggaggccaggaggctgaggagctcctccaggaggggctcaagcccgtcctggaggaatgtgataactaggttggggctggggaggcagcccagcgcgagtcctccccgggcaaataggctccgagggccccggggcctcctctcctcctctcaggcagcagggccctggagacaggcggaggcggggccagggccggtccctcaccccacatcgggatcggggccccccacttccccccaaggggccctgcccaccaccaccttcccggtgacccagatgaccacatttaataccaaatggggtggggggaggcgcccctccagtgccaggggcacgtgctgtgagcttcctgggagcccaggttgtgctcactgctctcccgtatcgtgagcaccacctctgctttccctgcgtagatctaggccaggggctgcttgtttttgtggagccgtgtgtgttcttctctgagcagctcctccccagaggaccccagcgcagtcccgggagatggcggaaagaaggcaccagggcacagtggacactcatcccgtgacagcgatggtgaccatgactgtgggagaaagaacaggacccgggatggagtggggctgtctgagtttccccagtgaactttgtgctttggcgttccacccctgttgttacttgttactgagtttcctagacctggggtgggtgttcccccaggaggaggggggtcccgacctgtgtcctgtggtggccatttgcagcttctgtgttgtgattcccttctcttcaacggtttcagtacatatctctcttcaataaatttcattcagtgttccagccggcctcgcctctgctgtgggaaactgcatggggtgcggggtgcggggtgcagtgttggctggggacaaggtgaggtgaggtgccacagtggctgggctaacatcggggtgtgtggggtgcttggtccctgagggtctgtgtggtcccctgggctgcacgggatggcgtggtagtcttgagcaggggctgattgggttcccagggcacgctgatcacctcccaggagtaggtggtttggacgttgcagacaggcagagggacagtaggctaggtcctggtatccaggatccctgacagcactgcggggtggggtggggggggcggcgctcagggctttcagaagggtcagagtggccacatgtgtaacctcaggctggaagccaaggtcagggaagagccccaggagggcctgggcatgaagtcagaggcccacacgggagccatgtggaggactccgcgggtgggggaccgctcttgggagacccaggcagctgacacccttgagagggcctctttccccctgcctctcccaacccaggacaaggagtg

SEQ ID NO: 42888 - DNA, 1814 bp, Artificial sequence
  DNA replication origin
ctgcgctctcccgggccggcgacgcggaggggtccgcgctgcaccgccgccgcaccccggccgcgtgaccgcactgcagagagcggctgcgagcaggcgcctgcgcaccggcccaaacgccgagcgagcgagggagaggcacagtcagagggaacgcccgcgcggggagccaggggcgcccgaccccgccgccgccgcagcggcgcgcagcccccgacgcgccctgtggggacccggaccaggagggaccctgccccgggaaaaggtatcagacccacccggggagggggacgctgggtcccgggagactccgccgcccctcgcctgtccgccctaacagaactgaagcagcctgcggggcagcggtccggggtccggggtccggggtccggggtccgggggcggcgcggggatgaggccaagacccgcagggaccacccccccgggggggcggggcgggacaggggcggggcctggctgcagaggcgcggccaggggaggagggcggctgggggtgggagtggacgtggacgtggacgtgggcgtggggaggggtgggcattaacctcgctctcgcccgctcgcattcacaggctgtggagacctgggctccgaccccagttcatccccccacacccccgccgccccgtgccaccctggtccgcgctgggaaccctatcctgcccctcgtgtcagcccggcactggccagaatcgcgggcatggcggtgaccatgctgcaggactggtgccggtggatgggggtcaacgctcgcaggggcctgctcatcctgggcatcccggaggactgtgatgatgccgaattccaagagtccctcgaggctgccctgaggcctatgggacactttacagtgctaggcaaagcgtttcgagaggaggataatgccaccgcggccctggtcgagctcgaccgggaagtcaactatgctttggtccccagggaaatccccggcactgggggcccgtggaacgtggtctttgtgccccgttgctcaggcgaggagtttctcggtctcggtcgcgtgttccacttcccggagcaagaggggcagatggtggagagcgtggccggcgccctgggtgtggggctgcgcagggtgtgctggctgcgatccatcggtcaggcggtccagccctgggtggaggccgtgaggtgccagagcctgggtgtgttttccgggagggaccagccagccccaggggaggagtcctttgaggtctggctagaccacaccaccgaaatgctgcatgtgtggcagggggtctcggaaagggagaggaggaggaggctgctggaaggcttgcgtgggaccgccctgcagctcgtgcacgcgctcctggcggagaaccccgccaggacggcgcaggactgtctggcggccctggcccaggtgtttggagacaacgagtcccaggcgaccatccgggtgaagtgtctgaccgctcagcagcagtcaggcgagcgtctctcagctttcgtgttgcggctggaagtgctgctgcagaaggccatggagaaggaggccctggccagagcatccgccgaccgcgtgcgcctgaggcagatgctcaccagggcccaccttactgagcctctggatgaagcactgaggaagctgagaatggccgggaggtctccaagtttcttggagatgctggggctcgttcgggagtctgaggcatgggaggccagtctagccaggagcgtgagagcccagacacaggaaggggccggtgcccgggctggtgcccaggctgttgccagagccagcactaaagtagaggcggtcccag

SEQ ID NO: 42889 - DNA, 1312 bp, Artificial sequence
  DNA replication origin
caatgacgcctgtcatctgcgagatgaggaggaaaggagcaaaggagattcacagaagaggaaccaggaacggccagtgagaggatgcacgacctcgccaccgctcggggaaacgcaaggcacacagcgatgaggtggtgtctctccccgtgggatgggcaagcaggcgaggctggacaggaccaaaggctgctcgggctgtaggaacccaggaccgctcccacgctgccagtgcgagggaacatgggttcagccacgcaccggaggtcacagatgagcaatgcttggttgtggcgttgataggcacagcccaagtcccagcagagccactgcctgctgtgcaccccagagtctttctggctgacggtggtggctcagacaggcatgcgggatgccactggcagcagtgtctgcaacagccaaacagtgggaaggaccggaatgtccatccccagggtcatagacaaatactctggggctgtgattcagcaaggagcttgggcgagctggacgcttgggggaaaccttggccagcaagttgccaaacaggaggtcaggcaaggaaagagaaggggatgagggaacgacacccagaggtgtgaccccgtgggaacctgtttgccacctgcctggtggagatgctgttcacatggccccagcctcccatgatgggtcaggtgcagggtggtcagatccacgggcgcagaatctctgttttgagcggaggctgctctgccctggcgcagtgtctagccccggcaacagaggactggggaaggacctatggaaggctgactcaggccctgacagacggaggtctccagggaggtacgacacccatgctgccctcagggccaagagagcaatgtcccagagcccatcaggctggtgagggcacagggggcaggggacaaattgagtagcccactccgcgcggactacctttccaggcacacactcaggcagagacccagactcgggacttgcggctgcaaaacggacgaggcccgggcatacttgggtgctgggtcaccctcctaggtgctggctcctggcaccagggcagcaaagtgcttcggccggagggctgcgggtccctgaagccggatgggcagcggggagatggcagaccctccgtaggatggtgtgcgtgagctgcgtgagcgcctggggcatctcctccacggaatggcacccgcaccaggtgcccctggcctcgcctggccttgccagccagaggaccagtcctggacggggagggggaggacaagagcaggtgcacaggccccagaacccggctccctgaccctgg

SEQ ID NO: 42890 - DNA, 784 bp, Artificial sequence
  DNA replication origin
cagttggagacaccagacccacagatgttcccagggcgggggcggccgaggcgggggggggggagggggggggggtcggtgccctttctgaagaaggactccagaaaaatcacggctgaaaacaagagagaggacaatatgtggtataagccgtgacaagtctaacactaaaggttcgatagacagacactctcacagcagaggtaaagagcagcagtttgcctgaatgagaacaagcagtcttggccctcaagggggagaagcggtggggggcaggggggcggggaggactggacacacgagcccaaccggggaggctgctttgtgacagaagacatgcgtttcttcgctgaccccacgtttactacctgggaggtagaaaagcctggggagcaagaccatgccaacctaagtaccacacagagagggagcctccctataagaatggtattcagaaataggcactgcagtggggacgcgtgcgccctagtgaactatgtgcatattcaggcaggggaaggcagacaaaggtttttcaggacaagtgaagaggattacataattgttttgacataatgatctttggctacaaggatgaataacaagggtagcattggtcaggggcttggacaggaagttgctgggcaggtgtcctcacagaagtattatttgtgtcaggttgcaacagcctttgtgcaaatttgtgggttttgcagtcttccgtgatagcttttgttatcaggcattcgtgcatgggaaccctgcctaggtggccctccacagc

SEQ ID NO: 42891 - DNA, 1571 bp, Artificial sequence
  DNA replication origin
tgatcttgggcttcccagcctccggaattgggaacaagaaatttctgttcttttgtaagtttcccagtctccagtgccttgactttgagcttcccagcccccagaattgggagcaatacatttctgttctttgcaagttacccagtctcaggtattttgctatagcagtgcaaatgggctagacacacaggcaagtccaccccaccttctggggctctagcttgccacctggggagggagcccctgatacccaaaagcaaagactcagaccagcatttctcacgtgccgacacatgtactgatgccgccaataagaatataaaccgagggcacgtgatttgtgtgtcccagcagagggggcctatgggaggaggggacagttcagctgagacatgaaggaggaggaggtgcaggaggagggggaggaggaggagggggaggaggaggaataggaggaggaggaggaggagggagaggaagagcaggaggaagctgctgccacagaaggttcttgggcctggatggctcacacagaggaaggagggatggcaaaggccgaaggtgggaacaagccctgtgctttggggccagctgaacaggccagatcggcaggaatgtggtgagaggagctgggggcatggcaacatggggtggatttcggggaaggaaggagagcatcagaggaagccagatccccaggagcagcgtggggggtgctcttgaccaggatggggactttgagattactctaaggagatggggtgccacagggaggagcagggtctggtggtgttgcaaaaagatcaccctggctgctgagggggtgttggtggagcagggaggaagcggagtggaggcagggagaacaggaggcagggcgggccaaggaccacggagatgagaagggtagcagtcttggagcagagtcaacaaaatccaatgatgggttagatttgggagtgaggaacaaaggagaggggagagaatcttggctgctttgtttgagtcaccaggtaggaggcagagccctttgcacagagggggaagcccggggacagtgtaggcatggtgaaggggacgaagccctccggtttgaacatcttagctctgaaatgtctgcggggcatccacgtgggcagatggatgggtacgtgcggagcttggaagagaggtcacgtccagagacagagcattcatcggaggtgccgtatgtcccagggttgaggctgggagcccgcccccaccacgcttagatccagcaaagtaggaggaggaggaggaaggtccaagggcagagaggcaggtagagagggaggaggtcagcccaaaagtggggtgggggagaggaagaagctgagaaaggaaatggttttgagaaggaaggagagtcaactgtgttgagaggtggagacaatggggacagaggactgacaaaagaaagacagttgacgtgtcacagcccagccttgcccggggttggcggggggcaatgggtgtcctgcagcgtcctggacttggagtcagcaggtgcagaaggaaggagagtgggaagagacaaggccgaaaacagg

SEQ ID NO: 42892 - DNA, 1396 bp, Artificial sequence
  DNA replication origin
gcaagtagttgtaactcagagataagttgctgcttggcagcttcttctctgttattgaacaccttgaaggcaaggttgattaaatcctgttgtggggtttgagggccagaatcaaacttttgggttttttttttttttaatgtcaggagtggattgggtgataaaatgcatattaaggataaggcggccttctggtccctctgggtctagggtggtaaagaatctaagggttgttgccaaacgggccatgaactgggctgggtttttatatttgatgaaaaagatcctaaacgctaacttatttgggagaggtcagataaagaaaaagtcacatgtaccctgactatgcctttagctccagccacctctctaggaggaaattgttgggcaggtgggggagagctagtcggggaatgaaactgtaagcaagactgagtgtgaggagggggggtaatagcagggttatagggtgggggagcagaggctgcggaagaattgggacccgattcagcctggcgaggagcggccgggggaggaggagagaggtcagaagggtcagtggaaaaggaggattcagaggactctgagcttggggtggagactgaaggagcagacgggagagaaagaaggaaaatctgagacaagtcgcactgggagcagagactagggagggagcgaagtgtaaaaaatgtttggacgtaaggcacctcagacaatttgcccaatttttcacaaaaattatctaggttttgtaggatggagaaatcgaaagttacattttctggccatttggaaccattgtcaagtttatattggggccaagcggcattgcagaagaaaataagacttttgggttttagatcaggtgttagtttaagaggttttaagtttttaagtacacaggctaagggggaagagggaggaatggagggtgtaaagttgcccatagtgaaggaggtgaaattgaagagaaaggtagagatgtagagaaggggaagtgagcagctaccaggctttcattaggtgtccctggctgagtcctgggctgtaatgtgggtgatcagccaaagcaggcatccccataattggcttgccacgaggggagtgtgggtgaatgatcaaggcaggtgtccctgtgaagatcagacaccaagggacgactgtcttcccaaatctgtgaccgacgtcggggtttctgaattcacagataaaatgtgtctcctttgtctctactagagaggaaaaagaactggaattggaaggacaaggagattgaagggtagcaagagaggctggagaagagagtgaagagaccacttacccaatttgaaattggtgagatgttcctggggcttgtctgaggactggaggtcataggtggatctcctcatggagt

SEQ ID NO: 42893 - DNA, 1534 bp, Artificial sequence
  DNA replication origin
atgcctggcagagcctgtgccctgccctctcctaaccagtcctgccctggtcacagcaacctctgattccagagcttggggagaagaacctggtgtctctcaaggcttttggagcaggggtctgggggcagcccaggctgagacgtcttcccgcgggtgggccagggctggcagcaagggcggcgctggaatatttggggctctctatttggagtggcggggtcctcagtcctccctcagcctctcaccttgcctcctcacagagcctgggtcaggttccttcggccgaactctacgccgtccctcagaatggaaacctcgcttctctctgccccacaatgcgcaagtcagtggcgtcacatccgggcacccggatgtttcctggcgggaaccggatcctgcctgggtgggggtgggagtgggcgtgggggtgggggtgggggtgagggtggaatggctgggcggatgggcatcagggttgagggatggggtgggggatgtggggtgggggttggaatgacaatgaagagggggttgggtcacgggagtgagcattggagtgggggttgggtcacgggagtggggtcttagggaccctcagccctccttgagaatcctgagcatgatgtctggcagagcctggacgctgccctctcctaagcagcccttccctgatcacacgagctctgacttcagagtccccagtggtttaagcagcaagggggctgggggtggcccagcctgagaagtccaccaccagatggtccaggactggcatgaagggattatttggggtcctctatctggggtaagtgggtcctcagtcctccctcagcatgtcaccttgcctccttacagagcctgggcccgcttccctccaccgatctcaagccgcccctcagaccgaaaacctcgcttctctctaaccactaatgctcaagtcagtggcgtcacatctgggcacctgggcttccctgggttgagagcaggggtggaaccggattctgcctggcttgggctgggggtgagcgtgaagatgtttggatgggtggcgtaaagggagggattgggggtggtagggggagggatgccagtggtgccccggggcttaagtcgtcgtgttggtggtagtggggttgggcgtggggttgggggaccctcggtcacccctcagggtcctgactttcatgcctggcagaatctggacacccatattctctgccgattgtgtctgcttctctcccaccaagtctctggcccccagtcccatgaggtggcaatgggagggggggtgtggtcgtggtaacattgccagggtcttccagggctgacaggaggggctgagctgcattctgtggcccatctacgtcgggagagtggaccctctgtccccactcaggaaggtcctcctcccggctcctggcactttgttgaagtcatgggcgggagatgctgtttctgccatctctgagcatttgcccagctgcacccattgcagagaatggctgcaggtcccaggccaggtgctccctgc

SEQ ID NO: 42894 - DNA, 1403 bp, Artificial sequence
  DNA replication origin
ccccatgctaatctgagtccccatcattctgattcttgaggccagaagtggcagcctcagtctcagacaggggtgcggtgtcctagggtgctgggtcctctgaggcctccctcatctcgcagtagggccctccctctgctcccctgaggccctgttcaagccccttccctccatcagccctggatggggacgtcaagatccgagtgcctggccgccattcccgtggcttccgtgggttgacagcagggattctgacaagatgaggttgggggtagggggtaggtatgggaatgtgagtggggtggcggtggagatgaggagacaggtgtgggtggggaaccctcagttccctcccagggtcctgaccctaatgccgggcggatgcctggaccttgatgcctgggccctgccctctcctgaccaaccctgccccggtcacataagctatgactacagattgccctgtgggttaagtggcagtgggacgggacggggggtggtccagctgagacatctgtcctggccgggtggtccagggctggcagcaggggtggtactggatcattttggggccatctacctggggtgtgtgcctcctcagtcctccctcagcatctcaccttgcctcctcacagagcctaaaaccactcccctcagtggatctcaagccgcccctcagaaccattaaatgaacctggcttctctcagatctgtgaggttcaagtcagtggtttcacatcgggccatccagggcttccctgggttgagagcaggggcaaaccggattctgccagaatgggggaggcgatgggagtggggcacatgagagagatgagggtggggttgggggcagtgagggtgaggtggcagaagggttggggctggtgctggggctggagggtggtggtcaggtgacggagtaggagtagggatgggggtggaggtgtagctgaggagatgggggttgggtggggaatgggaatgcgaatggggtgggagtggggattggagtgcagtcttgggggcccacagccctccctcttgggtgctgatcttgatgcctggcagagcctgtgccctgccctctcctaaccagtcctgccctggtcacagcaacctctgattccagagcttggggagaagaacctggtgtctctcaaggcttttggagcaggggtctgggggcagcccaggctgagacgtcttcccgcgggtgggccagggctggcagcaagggcggcgctggaatatttggggctctctatttggagtggcggggtcctcagtcctccctcagcctctcaccttgcctcctcacagagcctgggtcaggttccttcggccgaactctacgccgtccctcagaatggaaacctcgcttctctctgccccacaatgcgcaa

SEQ ID NO: 42895 - DNA, 1373 bp, Artificial sequence
  DNA replication origin
ttgccatccacttagatgagtaaatgggtaagaacctcctcgggccttcctgggagacccggatgtgtgaggaccgttctgggcccttgacccctggtgtgtctccacagtgctggccccgtggtgtggtgacatctgtctgtctgtctggtctagcatccagcacagtcctgggcacatgaattggtgctgatgctgctgaaggagtgaatgcaggccagaaggaaggagtgctggggaagaagtgagccatggagcaggtgggtcagggggcagggcagtttacctgaccaagctcgggggagaaggcagcttcagagacaggctggagggagggtggaaggaggagagtccttgtgcgaatggtggtcgcagatagcatggaggcttgccccctgcaaagccacccttgggcacaaagaccagggagagagaggaatgcaggaatggggagtgaggggctgctgagatccaaggacctggctttctgcctcagaagcttggtgtgcagctgggaggggccgagtgcagaaatgctcctctgtaaggatcaggactttagcagatgccagcaaatccacttgcacccagagtaggagtgcagagggaggcgatgtggtcagaggtgaaggagagagagcaaggagcctgatcaggaatgagggggcgtggtcaggagtgagggggcatggccagtgtgcggtgagtgagggggcgtggtcaggggtatcaagagcgaggggtgtggtcaatgatgaaggagtgaggtggtgtggtcagggatgaggagagtgagggggtgtggtcaggaatgaggcgagaatgaggcatagtcaagaatgagagtgagggggagtggtcaggagtgatgaaagatgggggtgtggtcaggggtgaggagagtgagggggtgtggtcaggaatgaggcgagaatgaggcatagtcaagaatgagagtgacggggagtggtcaggagtgatgagagggagggggtgtggccaggggtgtgggtccaaaatgaggaaaaggaaaaaccaaataccagaagaaaagttggacccagaaatcgcttttttacaacaagcagccgttctcggaattttgctcagtgcgtctgtattcagggagcgagaccctgggggaagcctgtgcaggagacagagggcagccccacctcattcttctgctggtcactctgtgctcaggcaggaaccacggacagaggcctcccagttcactcggggacatatccgcagatgtgagaactcagagagatgttcaagtttcctaagagggcttcaatcatggctcacaggtgacacaggagaaatccaagtgggcttctcaatttgttaaacttgtttttcctcct

SEQ ID NO: 42896 - DNA, 1262 bp, Artificial sequence
  DNA replication origin
tcaggcaaaaggggatctcccaatagaggtggtgggtgtgtgccaagggattaagtgtcaccaactgggggagggctttgggggtgcatgggctgcagcagtgggagggaatggatccctggctgctgcagtgcttgggaggggagggcaaaggcctgtagtgggggtgggttgattggcagcaacgtcgtccctctctcccctttgcactcacaggctgcgtcagagactgcaacagtcagcacacattcctgtctgatcaggctccctccctcaagtcctctgcgatagctctggcgatgcttcaggactggtgcaggaggatgggtgtgaacgcagagcgctctctgctcatcctggatatccctgacgactgcgaggaacatgagttccaggaggccgtgcgggctgccctgtcgcccctgggcaggtaccgagtgctcatcaaggtcttcagaaaggagctcggggccagggcagccttggtggaattcgctgagggtttaaaccaaagcttgattccccgccaaatagcaggcaaagggggaccctggaaagtgatctccctgccccaggcccttgatgctgagtttcaggatatacccagtttccctgcacagccccaggggcaagcagtggccagaggtgcaggtgaagcaggagctgcaggtgaggcaggatctgtaggtgaggcaggaggtgtgaatgaggaaagatctgcaggtgaagatgaggcaggaggtataggtgaggcaggaggtgtaggtgaggcaggagcagcaggtgaggcaggagcagcaggtgaggcaggagcagcaggtgaggcaggaggtgcaggtgaggcaggaggtgcaggtgaggcaggaggtgcaggtgaggaaggaggtacaggtgaggaaggaggtgcaggtgaggcaggaggcgcaggtgaggaaggaggtgaagatgaggcaggagctgcaggtgaggcagtaggtgcaggtgtggtggaggcctggacccagtcatggcgccagaccctgcggcctctggtgaaaactatggcctaccgggaactgagacccttttccgggagggagcagccaggctgcgtggaagagtcctttgagagctggttggaggacgccaaggatatgctgcagctgtggtgccacgcgtcggaaagggagagaaggaggcggctgctggacagcttggatggcctggccctggatatcgtgagcggcctcctggaggaagatccagacttctctgcgcaggac

SEQ ID NO: 42897 - DNA, 1108 bp, Artificial sequence
  DNA replication origin
ccacttgtcttccacagagactacgaaatttttcttcctcatctacctggggcttctgggagaagcgggaagccctgtagtcttagcacagcgggctttggagacccctgcgctgcgcagcgcggccgcgtgactgaggcgagatcttccaccctcctgctccagggcctctaggtggcctccagagtgggctccacagcttgaaggcggcgtttttccgcgggtggtcgcagcgtccgcagagtcggagaaagtgagcaggctccggcgggaccccagagtgaccgcgggcgccctgggcaggtgccagatcgctgcctccgcagtgggcgcgagagggggtcccggtccggcccagggcccgcagagagaggaggagggggctcctggctgcaggagtctggtggggcgggggtggggggtagggtgggctgccgttgcagaggtgcaggggacggtgggagagaggggggctctggctttcgggggaggaaggggacttctggctgcaggtgtggggggcgcggaggggggttgccaggttacacggaagatcaaaagaggaagatcaaaagagggagggggctcctggtttggcgctggaaaagagacgggggaggtctctctgcttcccttctgcagtttgggtaaggaagaactccaggctgcaaagatctgtgtaggggaagactactggccgcagggattctgggtgggggaagagctacctgttgcaggggcttggataggggaggactcctggctgcaatgttacagatgatggtgggagggggaggtgcacttgttgtggtgtgataaggggacatcagctcaggcaaaaggggatctcccaatagaggtggtgggtgtgtgccaagggattaagtgtcaccaactgggggagggctttgggggtgcatgggctgcagcagtgggagggaatggatccctggctgctgcagtgcttgggaggggagggcaaaggcctgtagtgggggtgggttgattggcagcaacgtcgtccctctctcccctttgcactcacaggctgcgtcagagactgcaacagtcagcacacattcctgtctgatcaggctccctccctcaa

SEQ ID NO: 42898 - DNA, 1815 bp, Artificial sequence
  DNA replication origin
ccagagacgccccctccctccaccgtgcactcttctgcggcccgcacactcgctccagccccgcacacagtcctgcaccccctgcacatcctctcgcggccctgcacgctcactcaggtccacacgtcctcctgccgcccccacgatcacctccgccctgcggcccctccagcgccccccgcacatcctcccgcggcccgcacactcacccaggcccggcggcggccgacgcgcggccctcggtggagcggcgctggcgcggcccaggcaggcctggcgtggcaggaagcgccacggagccgcccgtgcccagccgagctaacagccccgcggcgcgtttccggagccgtgagcgccgccgggggttctgagggagcgaggccccgccccggccccagtctcgtccccgattggcccgggaagggggcgtggcgggaagggggcggggtttgggcgggggcggactgggcaggcaagtctgatcagcctgcgggggagcggcgcgcgcgggctggacgcttgggtggaggtggggaggagtggaatgagcgtgcgaatgaatgaatgaacgagcgaacaaatcgaccagcagacgaaggaaggaacgaaggaatggaagggacctctcccccttgggcatcttcaagatggtggtggggggagtgaagggtcgggaactgagggcgaagactggaaagccagtattctgtatgaatggaatcagatcgtatgtactattgtgtgtctggattctttcattcaacgtgatgttttcaagatttatctatgttgttgaatgtgctatcgctgagtagtatgctattgtttggatatatcagagttggtttgttcattcaccaggttatgatctgggctgtttccagtttgggcgattataaataaagctactatgaatattcatgtacacatctttgtgtggacatatgctttcatttttcttgggcaaatacctaagagatgaattgccacatcacaggatagttttatgttttataagaaactgccagaatgtattccaaagtggttgtgcaatttacattcccaccagaaatgtatgcgagctccttttctttcccatcctcatcaacatttgaggttgtcagcctttatttttagccatttgaaagggtgggaagtggcatctcattgttatttcaattatcatctccctgatgactaattatgttgagtatgcttttatgtgctcactggccatttctatatctttctttgtaaagtgtctgttcaagtagtttgcccaatgttatgtgcagtatatatatatgtatatatatgtgtgtgtgtatatatagagagagagacaaaagagaaagctagcccattatgtgcaatgtgtgtgtatatatgtgtgtgtgtatgtatgtatatatatatacacacacatgtagttcctgagaaattttatgttttcaactttcattttagatttagggggtacatgtgcaggtttgttgcctgggtatagtgtgtgatgttgaggtttggggtacgaatgaccctgtcatccaagtactgaacatagtacacaatagttagtttttaaacccttgacccctccttccctgacccctcttgtagttcccattgtttgttgttcccatctttatgcgcacgagtacccgatgtttagctcccacttataaatgagaatgtgtggcatttggttttatgttcctgcattaattcacttaggataacagcctctagctgcatccatgttgctgcaaaggacatgatttcattctttttttatggctgcatagcattctgtgg

SEQ ID NO: 42899 - DNA, 931 bp, Artificial sequence
  DNA replication origin
ccgcgagaggatgtgcagggggtgcaggactgtgtgcggggctggagcgagtgtgcgggccgcagaagagtgcacggtggagggagggggcgtctctgggcagttggagagctgctcggccttgggcgggccagagcagggaacgggtcccggatgacgagtacgaagaggcccgaaggccttcccgaggcgggcggggggcggcgatcccgggtgggaatcgctaaagtgtagaggcctgctctgctctttgggggacgctaggagatgggaaccgctcaggggcggagagaaaggacccctgcccctagctcctaggagcccgatctggagggggcattgtaggggtgggggttaaaggacttttccctggtctaggggagggactgagccgcagtctgggagctgggagggtgggccaggtgggaacagttcccgctggggagtccctcctttccttttgagtgggtgggagtgggggggggcggttaagcctcagcttggtggggagaatgggggccggtaggtagcctagagagagagctgtggagaggcaggggaaagggggcggtgagccgagctcaaggccctctgtctgaaccagtctttttctgtcgccctactgggggccgccatctcccacttcagtgcccccgcccccttaaactcctttgctggctcctccagtctatatttgggtgattaattatatatcttttccacacacaccccccactcgcctgccgcccaaagtccatggtccctttcaaacaaccccctgcccccattcctggcccacttcccagaggtcccaccctgccaccttgttccaactgaagccctccagccagccttgacctagctgggcatgcggccccctccagtctccttagtcaatgaaacatttcctcttcaacctcagcccgacatt

SEQ ID NO: 42900 - DNA, 949 bp, Artificial sequence
  DNA replication origin
tttgggttagggttgggggcccagctgagctcttggggttgaggttagggttgagaggatcagctggcctcttggaggttttgagttagagttggggggttccagctgagctcttgggttcgggttagggttgagggacccagctgagctcttggggttgaggttagggttagggggtccagctgaacttctgaggttgaggttacgagtagaggggcccatttgggctcctggggttgaggttaggattgagaggatcagctgggctctctgggcattcaggttaaagttaggaccccagctgagctcttggggttgaggttaagtttgggagccctgctgagttcttggggttgaagttagggttggggggcccagctgagctcttggagttgaagttaaggttgggagggctcagctgagcttttggggttctagttagtgtttggggccccagctgagctcttgacggtgaggttagggttgagaggatcagcagggccctttggagattcgggttatgtttggagatcccagctgagctcttggagttacagttagggttgggggtcccagctgagcttttggagttctagttagggtttggggccccagctgagctcttgatggtgaggttaggttgaggatcagcagggccctttggagattcaagttatgtttggggatcccagctgagctcttggggttgaggttagggttgggggacccagctgagcctttggggacgtgtgtggctgctctctggtcacagaaggggtgacctcctcagcaccactgtggtagagagtgtccagaatgaggtccctctgcccctggcttctgcagtccttgcttctggtggcttccgggcccaggccccgtgctcagtggctgtctcagaaagaaaaagattcttgacaaaggagaggcccttccctccttcatcctc

SEQ ID NO: 42901 - DNA, 898 bp, Artificial sequence
  DNA replication origin
cgactgaggccggagctccggcggaaggccttgccgcatttgtcgcactcatagggtttcagtccgctgtggatgcgccggtgcttgatgaggtcagagggcccacggaaggccttgccacactcgccgcatgcgtagggccgctcgccactgtggatgcgtgcgtgctccaggaggctggagctctggcggaaggccttgccgcactggccgcaggcgtagggcttctcgcccgtgtggatccgccggtgcttggtgagctccgagctccttcggaagagcttgccgcagtggggacacccgtatggcttggccccactgtggatgcgctggtgctcggccagcccgttgacccctcggaaggacttgccgcagtcgtcgcagtcgaagggcaggtggccagtgtgcatgcgctggtgcttgagaagctcctggcgatccaggaaatccctgctgcacgccttgcaggcgaaaggcttttccgaagtgtgaagtttctgatgtcggaagaggtgggtgttgactttgaacgaccgcccgcattcctcgcaatcaaagggcttctctctgctgtggaccctcagatgctgactcaggcctgcattcttcttaaaccgttttccgcactcctcgcactcgaagggctttgcctccctctccatctgctccctcttctccgcggcattctccagggccctactggggccgggctggggctccgcagctacgtggcttttcctgtgctcattaaactccgccacccccctaaagaccttcccgcagtcgccacattcccagcccttctcctcactgtggactctctggtgctggacaagcaggactttaagccgaaaggtgtccccacactctttacaagcaaaatgatgttctatgggca

SEQ ID NO: 42902 - DNA, 673 bp, Artificial sequence
  DNA replication origin
gacccctgcagattatagtgcaaatgtcccttcctccagggactcttctctgccctttctcctcctagatgacaccagaactccttttctgctctcagaacacctggcattcgcctatacatcactgtcaccacttgtagttgtcacctaactgggaagttactttttaatgtctagaccactgcctccacaagggcaggaaggctggcggatcttggctcactgctgtaccccagcacccagcatagtgcctgccctggcacacagtggggactcagtgaatgggggtgggggatgggtgcattcgctttcatcctctgcctgtaggtcctcagttgcggtttcatggagcggccacgttgaaggcaggggaacaaggggtggcgggaagtgctgaaggggcggttgaggggcagtcctggagtctgcatggtgaagaaaggaggcctggaagaggttggggccaaggtaggcggggacaagggctgttgctctctcccatcaaggtcacggggatgtagaggaaggaagaagaggcttccattgagaaagggtgcttgggagtgggaggtcggtgggcaggtccagggtgcacccatgagagtgcgggagcaagggggataaacaacagcagggacactccagacaagcatgactagatggggcaggccta

SEQ ID NO: 42903 - DNA, 1298 bp, Artificial sequence
  DNA replication origin
gtaacttactacaaatggcaccaagtagcatagaaaatgtgactagccctgtatcttgcaaataaatttaattttgccatcaaaatttcactaaaatcaaagcgacaaaacaaggaggcagaggaactccagccctgccccctcacccccacacacgtaggggcagatgagtggtgggagtgagtgtttggcacaaacaagcttctctctttgcactcacaggctgtgtcggagactgcaacagtcagcacacattcctgattgatcaggctccctccctcaagtcctctgcgatggctctggcgatgcttcgggactggtgcaggtggatgggtgcgaacgcagagcgctccctgctcatcctgggtatccctgatgactgcaaggaacatgagttccaggaggccgtgcgggctgccctgtcgcccctgggcaggtaccgagtactcaccaagcacttcagaaaggagctcggggccaaggcagccttggtggagttcgctgagtatttaaaccgaagcttgattccccatcaaataccaggcaatggggggccctggaaagtgatcttcctgccccaagtacctgttattgagtttcaggatatgcccagttttcctgcacagccccagggtcaagcagtagcaaaagctgcaggtgagggaggaggcgcaggtgaggcaggaggtgtaggtgaggtaggagcagcaggtgaggcaggaggcacaggtgaggcaggagcaacaggtgaggcaggagcagcaggtgaggcaggaggcgcaggtgaggcaggaggtgtaggtgaggcaggagcagcaggtgaggcaggaggcgcaggtgaggcaggagcagcaggtgagggaggagcagcaggtgaggcaggaggcgcaggtgaggcaggaggtgtaggtgaggcaggagcagcaggtgaggcaggaggcgcaggtgaggcaggaggtgtaggtgaggcaggagcagcaggtgaggcaggaggcgcaggtgaggcaggagcagcaggtgaggcaggaggcgcaggtgagggaagagcagcaggtgaggcaggagcagcaggtgaggcaggagctgtgggtgaggcaggagcagcaggtgaggcaggagctgtgggtgaggcaggagctgcaggtgaggcaggagctgtgggtgaagcaggagggacaaatgtaacaaaagcctgggtccagccttggcgctgcaccctacagcctgtgctggaaaacagggcctaccgggaattgagacccttttccaggagggagcagccaggctgcgaggaagag

SEQ ID NO: 42904 - DNA, 1639 bp, Artificial sequence
  DNA replication origin
ttgattcacgtgtagtcgtcatggtaacaacagtgcattcccacgtgctcctctcttgtgctctccctatccaatcatttgccttgcatagcgacaccagtctggaactttctttcggaactccctgtggcttccgggagaaccaggggtttctgggagcccgggtgactgttggcgccaagtgcctcagagagccacacgcttccacgctgcggagctgaggtgatctcttcagacccttcggagagacccagatatctgacttcccactgagagacccggaattgcccagagtttgagaaagtgagtagaccgcgggggtttgccaggacccaggcccaggaggtgttgccggagctcaggatggcggcccaggaggttcccggggtgtggggggggggcaggcggtgtggcaggccgtgaggagccggctgcggagctggggggcggcggtcccgcctggcccggtttaggtgcggcgtggctgtcacggtgggcttcccgccaaggaaggccccctcgggagggcggttggaaggagggctgaggggaggggttcctcagtgcggggtggccagaggaggacccctgggtccctgggcggagagggtcgccaagcacgcggggtagaagaggcaagagggagggtgactcgcccagtgctggggtgagggggtgtcgagggcttccggctgtggggctgggggtcgggagggggctccctggggtgggagggcaagggggctgtggagcgccacgtgggagagcaggctggcgggctccaagcgtggggcgggacggagggcggcccagcctgggtctgaggcgcgagaggggacggcccctggcgggtgccgtggtcaggtcctagggctgggtgggtgagggcagaggtgattcctaagcccggtggagggccgaccagagcggagggtgccctgcctctgtgggctatgggggctcctgacttgggggtggagggcgggattgtcgggcccctggctgtggggaggccacagagggaggctcatgtctaagcacgtgggacgccctgctgcccggggctagactggagtgctgccagctgggtttagggggcgcccagtgtggaagggcacgttgggggcaggaagggactgtccccggtgtgcggtgggggatgggctggaaggagggccaatgcctaagggtgcacggggtgcggagccggaggctgcctggcggccagtggtacaggcgacggtgagcgccccctggaggctgtcggcgtggcagtgccgtgaggagcctggccccctacaggtggaattggaaaggcttcaggtcgcctcttcgtggggaatggcgacaggagttgcagtggttggagggggcagaccttggcctctgtagaaaatacggattcatgacaagggcaaattgtacattcacttagatagaccatatgtcgagccatttaaaaatcttcagaaactgaaaaggatcgcacgttttcataagttctctgatcacagtggaattttatttgaaattaataacaataacatatgtctagatattttgaaatccatgggtcaaagatgaaatcaccaaggaacttacaagatatttcaaactgcacaaaacattcaacttaccc

SEQ ID NO: 42905 - DNA, 1060 bp, Artificial sequence
  DNA replication origin
cagttttttactgtaaagaactgcaaacccatgcccaacctagagaggatgacagggcacacgggccctcccggcggtcctcacacggccctctctcctcctctccactccccttattgtggccctgaggcctggggcctcctgagagaggtatctccatctctgctttaggcaggggcagggcctcccgggcagcaaacccggattcagaacctggggaggaagagttggggtctggaagtggggaggtcccctttcctccctgggttcccaccacacctagccctctcacagtccggctggcctggctgctccccagctctggtctcccgttctccccttgccctaggctggcccaggacgggcaggtgaggtagccggggggcaggggagtgggcgctttcccacagctgtggtgctgcccactgtgccgtgggcacccgccaggtcacaggcagccccctcctgggggcaggttggcagccggtctcccaagccacagcaggtgcccaggggcccagcagggaggtccagggtgacgtcaagctgtctgtgggaagtgagtgagcaagttggggaaggccaggccaaagggggctgtaagccaccttcacagcagggcaggggtcagggcggcacctctcccaggggtcagctgggctgtggctgactgctctgctggagtgcccttggagggaggtggtcttgggctgcatgcagagccttgggaatatgctgccagcctcagatatccactgagggtgatggcgactgtgagctcctgtggggacaggatgtgtgtctggactggatgagctgtttttgcaactcctgcctccgcccccctgccagaaaagtgctgtagatggggtgcagccagtgagtgggggaggggatgtccaggctgcagtcccaggagacagtggctctggggaaagcaggggatggaatgcacgcggcaatgcctcaggtcacgcaggttgctccttgaccctgcagaagggtcggagtactgcgtggctcatggcatggagaatgccttgtgtcatgtgggccagtt

SEQ ID NO: 42906 - DNA, 1771 bp, Artificial sequence
  DNA replication origin
ctgcttgtcgccgccgccgcagctccctcgtccccctcgacacctgcaccctgccgagacgggccccttacccgcttacccgcacccctgcggcccagctcggccctcttacctgggctcggcgggcagccgagggagtcggcctcccttcctgctcccggcaggcccgaggccaaggccgccgcctcctcctagaagccctccgaggccgcgtccccaggaaacgcgggcggggggtgggggctcctgggcttgtctcgacttcgcctctgggtaccgctcgcgaagagcgtcctgaaggggagtctcagtctggtgcgccgacgagcgggccgggagcgggcggggccggggcggcggcagcgtgggaacggggcgcgttgtggggggggcatggagcatgcgcggcgcagagggatggcggcccgccccgcgcccgccccacaggggcgtctggcctggctccccacgcgccccgaggcacttccgctttctgtctgggctgctctgaaggctggggtcgaagtggtcagcgcaccgcggctcctgaaggggacgggagggacccgcgttggcagaacacctcccatgggctagacccctgggcgttattacgtccattcattcagttattcatctcgctggggtccccgggacctctgcagggcagctagcaccaagtaccccggccatggtcactcagtaaaggagtgacccaggatggcaaggatcagagagcggggaagaggtgaaaggtgactcagggagcatggtgtggagacacgaggaggggaaaaaggaggtcagggaagtgcaagaagccaagaccctctgggtgcatctggctttccctcaggttaccggaggggatcgcacctggagtttgtcattttccaaagggtcatgctccacgtggtagagcagggagtgaaatccaaggttggttgggatattgctctgatgacaattgtgagacctttgacaaatagtgaagcgtatgaaaaagaccgtaaaagaaaagcaacagggaaaaatcagccacatcacatatcccagccccggccactgggaactgagcacgaggcgggagcctccttggcctttgaaccagagttcaggggtttcttttcttcagagaccctgggccctggccaggagcacttagcccgcagcaaggagccctcggcaagcctgcgctcccagaacaaaagccgtccatctggggcataggggaagggcgaggacgctgctcagggaacctccggttgcagggagcagggcccccagggggcccagtgcagggagagcttcggagcccctttcccggcgcagaggcagggagtctcccggtggccctcagctgtgtgtcctggtgcccaagcttgtcccttcaccggggctctggctgggcaggctgggatctgggctgttgagatgttgtggggtgactggttggtgccccttgaaagatacatccatatcttaacacccaggcactgtgatcagggccttatatgcaaataaagggtgtctgcagatgtcattaaattgaggatgtggagatgagagcaacccagatgatccagggggccccaaatccaaggacagtttccttagaagagacaggagagagagacacagagaaggccatgtggaggcgaaggtggggagtgcccagggcccccagaagctggaagaggtgggtggatccacccccagagccaccggaggaagcgcccgattctggactccggcctccagaactgggaga

SEQ ID NO: 42907 - DNA, 1559 bp, Artificial sequence
  DNA replication origin
ggagccaggccagacgcccctgtggggcgggcgcggggcgggccgccatccctctgcgccgcgcatgctccatgccccccccacaacgcgccccgttcccacgctgccgccgccccggccccgcccgctcccggcccgctcgtcggcgcaccagactgagactccccttcaggacgctcttcgcgagcggtacccagaggcgaagtcgagacaagcccaggagcccccaccccccgcccgcgtttcctggggacgcggcctcggagggcttctaggaggaggcggcggccttggcctcgggcctgccgggagcaggaagggaggccgactccctcggctgcccgccgagcccaggtaagagggccgagctgggccgcaggggtgcgggtaagcgggtaaggggcccgtctcggcagggtgcaggtgtcgagggggacgagggagctgcggcggcggcgacaagcagggactccctgggaggcgggctagcactgagtggccggaccagccctcggggccgccccgtaccaggggcgccaggggaagagccatccagggctgggcgctgggagctgcggcccgtgtctgtcaatttctctcctgattggtttccagccaccggtcccgaggctggctaaagagcatcctgtcgctgatctgcctggtgagtttggattttgcacctctgggtgtgagagtgctgggcagactggcattgtgaggttgtggcaccgctgcccaggcaccggccctgagggtctccagatcggggcaggatgcccaaaattgtgctccagagggtatcaggtgggggctggtgcctcgcggtggtgcgggatgttgaccaggtgactggcatgccacggaaaagcatcagcttagccaagccaaggaggaagcgaagggccgatggaagtggtgggcaagggtgagagaaggagccagctgagctgggcagaaagcggcacccagcgcttccctacagggctagttgtgactgattcactcccacagatacctcctgagcaagcatttgagatctgccagggacacggcggtagtaagccctgccctgttgttctcgttctagtggctgagcgcagacaataagcagaaaatgttttccattagtaattacagagtctgttaaaaggcagtaagagccggggaagggaggtctggttgccagtttaggtggttagaataacttattctagaataagtctcatttctaccaaaacttgaaggtggtaaaagagcgaggcatgtggttatggttttggaagagcattctaggcacaaggaatcccctgtacaaaggccctgaggcaggggtggcctggctcaagggagcaagagtgtggcaggagcagagggaggtgcagaggtgggaggagggttgggcaaggtcaggaagggttgtgtgagtttactctgagtgacacgggcatcccagggataactgtgagcagagaaggacaggacccgacccgcctgttagaaggatccctcagcgagcagcctgggtggcccccttttggctaggttaccctctgccc

SEQ ID NO: 42908 - DNA, 1832 bp, Artificial sequence
  DNA replication origin
gccggtgctcccagggcccgctagcctccgcgccgtctccgccttcgcagggcgcctggcgccgtgcactgcctggtgcttgaataggttggcgcgccggccgaaggccttgccgcagtcgctgcactcgtagggcttctcaccgctgtgcacgcgccggtgctggctgaggcccgaacggccacggaaggccttgccgcactcgcggcacgcgaagggccgctcgccgctgtggctgcgctggtggtggatgagctgcgagacgcccttgaaggccttggcgcactggccgcaggcgtagggcttctcgccgcggtgcgtgcgctggtgctcgatgaggttggagctgcggctgaaggccttgccgcactctgggcacgcgtagggccgctcgccgctgtgcacgcgcgcgtgctccaggagcgcgaagctgcggcggaacagtttgccgcagtcgccgcaggcgaagggccgctcgccgctgtggatgacctggtgcttgatgaggttggagctgcgcgtgaaggtcttgctgcactcggggcaggcgtagggcttctcgccgctgtggatgcgctggtgctccaggagcgcgaagctgcggcgaaacagcttgccgcactcggggcacgcgtaaggcttctcgccactgtggatgatgcggtgcttgatgaggttggagctgcggctgaaggccttcccacactgctggcacaggtaccgcttctccgcgcctttggggccctgcggccccgcagccgaactctgccccaagccctgggcacctctctggagcacagacgacctcgccgcctgcccctccttgccaccttgtggatcggccccggggagttgtcgtccagaatgcttctgcgttgaagtcgacgtcttgctctgtgttctgtcacctggaaagacagagcaccaggcagtgtcaccctcatgccaagtcagagagatgaacgagcaggaggtgagaacatagggggatggggcaaggtgaccacagaacagaaagccatcacacaggcagacaggagagatgaaggggcgggaggatgggctggagatagcggggctgctgtgacacctggagattgacatctgcctccaaagaggatttcccacccaaagcggcagggtaccctcccccgccccctttgccactgctatttctttttaccccgatggggagctggttgagcacctctcactcacctatgtgcaatcctgcggtggcccaggttctggggatgtctgctacccagggtccttcccctcgttccaattgggagatcaggtgaggcttggagaaggaaaatcctgggcgtggaatatgaagcaggtcaagaccactatggctgagggcagggtcgctcctgaactcaggcaattctcaatatcttcaggtaacagagaataaagaactctctaaaaagcactactgggaaggctcagagaaagggccaagtccctctacgagggcaagggctcctgcgcgtccagggccaggtgggcacggagatcttcagtagctggcgatttgggccatgaggacaactgtgtttgtcacctggcctgcagggaggctgagaagctcatgagaaatcggggatgtgtgtgggcaccctgagggacagaagaagggcttgcaagccccagggactattgggaggccgacagccataggccccgaaagctgaattgccctgtttcatcatccaactccactgaggatcccagacccctccctggaaccccaggtctgcctggtgagtgtcagaaggaatccaggggatgaagctgctttccctctatggggctagattaca

SEQ ID NO: 42909 - DNA, 1544 bp, Artificial sequence
  DNA replication origin
ggccttcaagggcgtctcgcagctcatccaccaccagcgcagccacagcggcgagcggcccttcgcgtgccgcgagtgcggcaaggccttccgtggccgttcgggcctcagccagcaccggcgcgtgcacagcggtgagaagccctacgagtgcagcgactgcggcaaggccttcggccggcgcgccaacctattcaagcaccaggcagtgcacggcgccaggcgccctgcgaaggcggagacggcgcggaggctagcgggccctgggagcaccggccctgggagcgcggtggcggccaccagccccccgcggccgagcacagccgccaggccttccaggcccagccgccgctgactccccgccagcgcacccagggcgcggccggtctgcgtggggggccttcctggggacgtcgaggctcagcccccttcaggtgggaagaccgccctcccagggcctcgattgcggccacagccctgacctctttggccatcagaagaccccaggcagagcctcaccctgaggctgagaaacgcaggaaggactcagaaccgaggactgccgcctgccctggctcctccatcaacggcagtgcgggctgggaatggaggccctctactccctcctgagtcctgggccttgcaactgaggcacatagatggcacctgggccactcgtccctgagccacaggtactatcgagtgtgcacaggcgtgcgtggaggggatgcgtgaaccatccctcggatttgcatcagaatcgcctgctgcgggtagggaggaggccacgtgaggccagtgaggccagccagcgcggggcacgctggctttgagttacagaagagtggtgcatttcctccctgggggtcgttcccctcgccctaagagttgttagtgttcccaagtagaagatactgaaagcactttaatcctttaagcgcttatattgcaggtgggggaggcgctaaagttagcacagaggcaagaggctccctgaatgttggcataggatggggggctgtgccagaaaactcccgccttgtctgggtggccccagctgcttctgggaggaggagcagcgcccaggccccatcatccctgagcaccagtggttctgggaatggctagcccaggccctgcagagaggataagacccttcaagtcactcacaattggacatttgtagctagccaccctccaggctttgctttcccccctgcccgcccactgccttctgctccccagaccccaccagcaaaggccaccctggcctctctgtcccctgtccccctgccccgccccaccaccagtgcctaaagcttcgcacttacctgctcctccccatcaggcagcctctcttgcggctggtgacgattaggaggaaagccagacgggttaggaatttgcacttaggcaacagagcaagcccaggaacgaatctttcatcgaatgtcttttgcgtgacattttgtagaatactggacgttccgttgctttgattgtttttgtattcaggggtaatgtatattgaaaatagagatttt

SEQ ID NO: 42910 - DNA, 2014 bp, Artificial sequence
  DNA replication origin
cagagctgctcgcctgggccgatgagcaggcccgtgggtgggcccacatcgagcccatgtacttgccgcctgatgaccccagcctggaggcctgagcaccagggccacctcctgtgccatggacagtgccagcctccaccgttcagctggcctctaccacccccggctcctcctatctgggcagcctcaggtccgtgcacctgccaggccttccctggctgcctgaccagccatacggccctggattcctctccaggccccgcttccagggccgtgctctcccggctggcctgggtgcccagcagagtttgctgtttcccaataaacattgccaactactcaccctccgactagctggccagatactaggggctggactccctcgaccccctgctgagcagggccaggcggtgagccatgccaggggccagcacaagacctccagggccgcccccctatggcctctcctcgcggtgaggaccgtgggtggctgggtagggagacgtcaagctcttgggttggtctgagggctgatgggttgtggctgtgggctgattgccgcccatctgcattgtcaccccagaggcccaaagaagccatgagtagggccttaagcccacagagccggccgcctgcctgggcacaaagctcagctgcagcgcttgcccgccgtgggacctggagtctctgtccctgctctgtgaagtggtaacagggtgaaatgttaagaaacggggtgctggggaaaagggaggtgcccccacatgtgggcatgcacatgtacatgtacatgctaagggccctgacggtgcacggagcagaggtggggtggctggtgctgtgagggtgaccctggaagggagcctatcctgcagcccgtgtccccgtagggccaggaggccgctcggtgggagggcagcttctggccaccgcactgtgctttgggttccctgctaacctgcctcaggggccccaccctgaggcacttccagtcttgggaggcctcatgggtggggagagacctgtcaccaacgctgggtcaggtaagaagggatggggtggccacgcctgagagtgactcacatgagcaaagcctgagcctccagccagctggacaatctgggaagccctaagtaggtcagaatgactggagccactgcagcgtgcacggtggtaggatggtgaggccagagcacaggcagtgaccacctcagaccttccttgtggcccgggccaggcctgaccctgatggcagcggggagccgcggagggtcatgagcaggagaggggaaaagtctggtgtaggcttctgccatatgctgcttgggctgcgtgccgagctgttctcgagttgctgtgaagaaatacttgaggctgggtcatttacaaagacagcgggtttattttggctcagcagtgctggcatctgttaactggtggggcctcaggaagcttccacttatggcagaaggcaaagggggagcaagagagaggcggggaggtgaactcacagcgagaattcaactccttgcggaggtgaggacggcaccaagccattcatgagggatccaaccccatgacccaaacgcctcccaccaaggccccacctccaacattgggggttacatctcaaactgagatttggaggggacgaacgtccaaaccacatcaggctgctgcatggagaatgggctggagaggacagcgacggcaaggcgggcagaagcagagcatggagggctttggtggagggagggagagctatgggcctggccaaggacagtggcagcaggggaggggagggggcacggtctggggaagccccacaggacctagtttgggaatgtggttagtaaccagaagatcttgtcacagccaagcttcccgaggagagcatcacctgggagagtgtcacaagccctgggctggccctacagaagctggagtaggggacactgagcccccagatcccctggtgcccagacagggcctgcttctgtttatcttactggcc

SEQ ID NO: 42911 - DNA, 3221 bp, Artificial sequence
  DNA replication origin
tgtgccacgttggtgtgctgcacccattaactcgtcatttacattaggtatatctcctaatgctatccctcctccctccccccaccccacaacaggccccagtgtgtgatgttccccttcctgtgtccaagtgttctcattgttcagttcccacctatgagtgagaacatgcggtgtttggttttttgtccttgcgatagtttgctgagaatgatggtttccagcttcatccatgtccctacaaaggacatgaactcatctttttttatgggccgcgtagtattccatggtgtatatgtgccatattttcttaatccagtctatcagtgttggacatttgggttggttccaagtctttgctattgtgaatagtgctgcaataaacatacgtgtgcatgtgtctgtatagcagcatgatttatagtcctttgggtatatacccagtaatgggatggctgggtcaaatggtatttctagttctagatccctgaggaatcgccacactgacttccacaatggtggaactagtttacactcccaccatccttttggtttcttttctttcctctgcagctaccaagatgaatgaactaatggagaaatagaaagtcttcagtgatggcctacgccaaagcacaggatggggcgggcaggaagccctctcccaagatcgagttggccgaggatggatgattgtggcagcagaagccgttgcagccccacgttgtgctctaggcagggacctttggcccctttggggagggagagacagacgggcggtttgacttggacacaaagaaagccttggtttctaagcagttgcctccagcctgctttctgcttcctcagctctatgtctctctccttccccttgtcctgagctgctcaggtggcccaggtctgggcaggctggcggcggccctcctgtcatcttggcgggcctgggctgcgtcctcttcctgtggctccactcctccctgctgctgccagccacttgaaagcagagaacccactgtcgcctcccccggctggccttagggtcctgtgcgagacgcacccctcagccgccctccttgagtgcccctggatcccccgcggggtaccagtttcctgctcctccctggctgggcgctcagctctgggctggggaattcagcctgactggttgtccaggaagatgctgtctgggcttcccagggtgacccagtatctccctgagcagtgtgcctgtcacagctgcctccctccctgtgagtaccggaacaggcgtgactggtagggcctctgcctccttggggccattgtacctgctgctgcccgccccaccctgctccctcctggcaccatctcctttgcttccccaaggtccctgtgggcacacaaggcaaggaggccaggaggagccaggtgccagacccccctccatcccagtcgcctgaggcatcccccagccaccactgtgagaggtgggaggccgggcaggcctgtggtcaccatggtgcaggtgcaccacctgatttataggccaagggactcctcttggtcacctctctgtgcccccagcatggggctggccctgcagtgcacccaccatcaagggctgttgtctcttgctccagaatgaggtcttcagggcgccactgctcgcaggaccgggaaggacctggtgccctttgcctggagcgggatagacagggcaggtccctgagcctggggtccgaggggctgggcttcactcctcctgtagtcccggcgctcctggcccaccccctaacgttgcttatctgtggtggaggaagcattagctcagctgcggcctgcacagctcccgggccaggcccacctcccttccttccccagcagccactgttaggtgcacggtagacatgatgaagcgacgtccttaaagcagatagcatctcccgaggctgccccatccctaggttttgggggagcaccccttcccctttggaggctgagcacggcatgtgtgggcaccttggtcacactccagagctcgcttcatccccacgagcggcacctgatctccagtgacggggagactgaggcctggcaaagaggacctgttgcctttgtgtaactggccccagcatgggggaggcattggccccagcatgggggaggcattgaccccaggcctgccaggcctggcagccacagcctggctaggtggaggttactgccttccgcaccactctggcttcctccccgtgcctgtgaagagctcggggcctgcttcctaatttgtaaacacggggcgtgtgtctcagtggctgtgagctagcgagggggtggcgagcgagccggctgcgcaggtcctgaggccccaggcctcattgttggccaacaggcagctgggggcgggctgcggccgctgattaaaggccgcctagagcagcctgtgtggcgacaggtgcccagaagcccaggaagccggtcagtgcccgccccaggtaagctggtgtggtggggttggcaaggacagtctccccgggagcctgggggcaagcaggcagaggccagctcgggaccagcacctgtgtgccagggacaagggtggggaggtcgagcccagcgggagctgggtgcactgcatgggctctttcgggtggctgcttgcctgcttcccggcagctggttccagggctggagacccagtgtgctatgccccaggttcccagccaaggcattccggtgaaggggctggaccccgccaaggtgcggtccctgagctgcctctgcctctcccaatccctgctggggactgtggctggaggcaggcagtagagcgctctgaggcctgccttttctgttcagtaggtgacaggagtggggctgacgctcccagagccaaaggtcacaggtgctgtggtcgggggtggcaggaagtgagccccagaagggtcagagctttggctagggggaggatggtacacagcagggcccgggcgaacccctctctccagtcctcagggtttgtgcctctcgctcggacagtttgaggacttgctatccccgtgggaacatcaccatgtccgaggcaccccgggccgagacctttgtcttcctggacctggaagccactgggctccccagtgtggagcccgagattgccgagctgtccctctttgctgtccaccgctcctccctggagaacccggagcacgacgagtctggtgccctagtattgccccgggtcc

SEQ ID NO: 42912 - DNA, 1407 bp, Artificial sequence
  DNA replication origin
ccggaagccttgagcttctggctgggtggctcccatgggtatctcactcacctttccggcgagtgggggactaattcagccccgcaggagctgctgctcctggagcctgggccttccgggctggaacgccagtcccctggctggaaagcaggccacctctcagccccatcctgtcggcttcatctgttcccagctgggacggcgatccttggaggagaacaggccttgtcctggaggtgtccctgtgggctgtgttctgtcatagcaggccctgctgtgtgctgcctgcccacccagcaagccatgctgtcggctgcacgacagacacatatgctcctgtatgtttctgcagtgctcagcccgttctggcgtgtggtcccagcatcattacagcccaaggcagggaccaggcagggagcacttgctagtccaagacattgctgggcaggcacagggtcgttgatgggccaggcccctcctttcccctggctcctggcatgggtggcatgtgggggcaggggcactggggacagctggccttggcctggcttagatggagccagtgaatgtctgtggtcttccttgcccagggctgtgcctgcgcccagaagcagctacacttcatggaccagttgctcgataccatccggagcctgaccattgggtgctccagttgctcgaggtaaaggtgtggatggcccaggtgggcagtattgacgggcttctcttggtcctagttctggagctggtaggggctggggtgtcactccccctctgatgctggctggggtgtgacaccccacttggggatctggctggccaatcaggggccgggcagcatacgggcaaggggcagctgtgtcccaagggtgctggctgttgcccaaggccccgggggtgagtatgaaggtgggatgtgggcctcagagcagacgggccaggcacagaggagggtgagcacctagggtgctccatgggtgggtaggtaggcgggcaaaaatggaggagccagggcagacaggtggggcaggattctgcgcggtggggcttgtcctggcctctgtgcctggccccgatgtgcttctggggccttccctgtggggctgagggcctgctgggcgagtgctctggcctgtgacggtgtggccctgggggctgcctttgcagcctgatggagcacttcgaggacaccagggagaagaacgaggccttgctgggggagctcttctctagcccccacctgcagatgctcctgaatccagagtgcgacccgtggcccctggacatgcagcccctcctcaacaagcagagtgatgactggcagtggtacgtgctcctggaggcctcagtggcagcaccctggcctcctgtcccagccccaggctgcttggttctgttactgcagac

SEQ ID NO: 42913 - DNA, 1143 bp, Artificial sequence
  DNA replication origin
aggacgcccagctggatacaggcccccagaggaaggaggaggcgtttttgtgtttgagcccttgctgttccagaggcgtctcctgcctctgccttctaggcccttcctcaggcctctccccagggctcagcacagcagctcctcgcttcataaccttttgctcttgctcacattgttccccctcctggaaatggccttctagtctctgcatgtcgtacgtcctcctgtacagcccgcaaagacccaactcacacgtcctgtctccttttaaaatgtttcctgttcccagggcagaatgtattccgcttccctctggatgcccacagcctttgagcacaccctgcccctgctggagccctcaacctgtgggtgcactcttggcctgctgtcatttccggctctttagtatgggagccgcagcatggtgtggccgtgcagtcggggggttctccaggctgcacctgtgtgccattccacgcgctgcagacgtgactgggtgtcctcaggagctgggtatttagtgggtacaagtcctggggttcagcagaaatgatgcacagcactgcagtctgagttgggtgctgtggatgttggcagggaggaggtggcatttgatctgggatggggacggtaacagcggggtgctcgtttggacaggagcagggagttgaggtgtgggagagagagctgggcagcagcagctggaatggcagctcagggcagctccctcagggccttgcatgctgtgccaaggcctttgagctttatgttctgggcagggcaggcgtggaacctggggagcgacgtgctgagattggcattttggtaaggtgactcagggtgctctgtggcagatggatttggagggcaatggctgcaggcagggagaccaataccccagggaaagacagaaggagccctgcgctgagtggcagatggcttgtctggcagccactactggccctggagggaccagcccctggcctgggaacctgggaggctgggaggtgaggcaggactggagatggctgggtggagtgtgagggtcttgagcgagctcccaggaggaggctcttgtgggagggggcgcagatttgcctgactcaggtggaagctgggggcacttggggaactggggtcatc

SEQ ID NO: 42914 - DNA, 1233 bp, Artificial sequence
  DNA replication origin
ctgtgtccgccccgcccccttccctgtgtccgccctgcccgcttcactgtggtcctgcctctgggtggtgccggggcggggggtgggagcccggggcccgcgcaggcggagatgtcgcccaatgggaagggtcggtcgggaagggggtgggcgcaggcgggtgggcgggaagaacgctggaggttgattggcggtcttgccggccagtgaagccagggcatgggcggggcgcggctcggagcgcgaaacatggcggggcaggacgctggctgcggccgtggcggcgacgactactcagaggacgagggcgacagcagcgtgtccagggcggctgtggaggtgttcgggaagctgaaggtgctgttggcccagaaagccactccagggcgggggaccggggagggccccgcccgaggcccgggagggcttgctgcggaagtccgcggcgccacgcggccaccgtcgccggttccggctgcgccctgttcccttgcagcagggggtgcttgtggatcattcatctttgccctttggtgtgccccaggccttcgttcttgctgtctccacggcccgtgcctggtagttggggccagcaccgcctgtggaactgcagtacccgcgctgggcgctcggagcaagtgcagacacagaggacccaggcctggccttagggatcttgcggggtctggggggacagatgggcagagcctcgtgccactctgtcaagtcagcgagactagggcttggtgtcagttggtgtcagatgccaggggtgatagcctccagaagccctctacagccccacaggacagagccctcactgcagcagtgaggaaagctggcccacgaggttagggagctgtcccaggtcccctcggcccgctcgctcctccccccagacactcccccatcctgtccgcgactggctcagtggtccctctccctttccctctcccctttccctcagtcccgaaacctaggactctctcttaagtcttagtctcaggcgttgctcctaggtcctgctgccacaagagcccagagtgggagtacttgaaagaggtggggtctgcatgccgcgggagatgtggggttaagaatggggggacttgaactcttggcaagatggcaggacgcgggtaaaggaaagggtcctgggagcttgcagatgtacactgaggactgggcgcggcggcccacgcctgtaatcccaccactttgggaggctgaggt

SEQ ID NO: 42915 - DNA, 1059 bp, Artificial sequence
  DNA replication origin
gagtagtcgtcgccgccacggccgcagccagcgtcctgccccgccatgtttcgcgctccgagccgcgccccgcccatgccctggcttcactggccggcaagaccgccaatcaacctccagcgttcttcccgcccacccgcctgcgcccacccccttcccgaccgacccttcccattgggcgacatctccgcctgcgcgggccccgggctcccaccccccgccccggcaccacccagaggcaggaccacagtgaagcgggcagggcggacacagggaagggggcggggcggacacagggaagggggcggggcggacaccgggaaggaggcggggcggacaccgggaaaggggcggggcggacaccgggaaggggcggggcgaacgggccaagctggctctgagtcgcaggccttgctggcgtcgcccctgctgccggccgggaatgatgatgcgttgaagcgaggctcttccaggagggggcgctcctgccttggtcgggttctcctgggccaccaccactaaggggcaccctggttcccaggaggaccaaggggagccttgggtgcagaatggaactcggactgaagcgttcctctcccagcgcggggctccgtcttctcttcaccatgctcacgctgtagttagaaggaaatttcttgtcactcaccagctgtgtgcctttgaaccagttacctaacctctctgtgcctctttgccctcacctaatggagctaatgagagcaccttacccactgggttgctaatgaggatggcaggcggtaataattcctgtggaatccctagaacagtgcccggcgcatgcgaagaaccacgtaaatgctcactattgtaatacatgctgggccctgctcccctcacggctcctggggctacctgtggctccttcctatcctgtctacttaacaaatttttctacatccctcaggaccctcaaactcaatgcgtctgcaatgaaatatgtcagtcgctcctcccccagacctgcaaagcccccagttcactgaatgccccttacccagggacctgctgattgggcaa

SEQ ID NO: 42916 - DNA, 1171 bp, Artificial sequence
  DNA replication origin
acatccctcctccaggtcaatgggtccttcagccacatttttggctcctgacccacccaggcctccctcagagaacctggggtctctgggttggaatgtcccttagagatgtgccccctccctcccccatggtaggactcaaccctccacatccccgcccacccacctccctgggcttgtagaccttctaggaccgggagctcccttcctctcctggcagccagctggtgttcagacagtgatttctgggaggagtgctttcttggactgagcttgagtccacatttccagaagcttctacctctgggccccttctttcccccttcctgagaggcccagcagcctctctgttccctccccagcctccagcttttccggaggaagatgcctgggaggtgctatgattctgggggcgggtggtgggtggcaggtggtgggtggtgggtggtgggtggtggggtggcgtgggcagggaagctgcagcctgctgctgggtcttcagcgaccatctccaggggctgagggctggccaacaggttctccatgagggggatggcctccataacctctcaagatgatcttcgcctctcaaggccctgccagttcctcagggtcccatagactgaactgctgaggttggggaggcctgttgagcacactggctccgtggagctgggtggaggagggagattttcttccagagtacacaggagctggtttcttcccggtcctcaggagcagagaatatggggagggttgggggaggctgccacactgccgtggtttcttccgccaaattccccagtcctaggaaagatccacagaaaaacccacaagaatttgaatgtctgagctggggctgtgattgagatgaaattttctaaaaagaaagaaagaaaaacaaaaacaaaaaagagggaaaaaaacgcttaaaaaaaaatcccaaagcctttgacagccctcagctaccagaagggcctgaggcagcagccacgtggaagggtagagagcaaccttgaggcacttcgctgggcctgtgtcggggcctcccaggctgaggtcccttcctgtgacccccggactcctgcccgctccctcctcccaggacggagtgaagtcccctcctgtcacttggatgactgcagttgcctcccagcaggtccctgggtct

SEQ ID NO: 42917 - DNA, 2392 bp, Artificial sequence
  DNA replication origin
cccgcccatagcgtggcttcgctggactccgtgtgaaagcggccccgccccatcccctccggtgggcttcgaggacctcggcagggaacggaggttgggcagaagctggagctcaggcccggccggggagctcgggcaaagcaagaaggcgaggcgggcgccccctcccccggccggccctccgagcgggcacgttcgtgttcccgtcctggcgccctcgcttcccgctccagacgcatgtgactcagccccgccggccttgccaagccgtctagacccgagcgtctccccgcggagggggcgatcccgcccgccgccgtttcctttgccgccgcctgcgcggctgcgccccgcgcacgtgcagcagcgctcgcccccgcccgccacctcccgcgagccgcgtgcacgcgcagccactcgcccatcccgcgccagcgcccgcgcccccgcccccgcccccgcccccgcccccgcctctcccgttgcgtccactgcaaacaggcagttcgagggcagaagcgggaaacccaaaggtccccagggccccagaccatccctcccatttttggggcccggggcaggaggacaaagatggaccgctgagccactgcctccctgccagccagactctgtccacaccccctacaactgcctctggcctcagagcaagggtcgccctaggtcgcaggccctgccctcttgcaggagcctgtggcctgggggacagggcggggtaggtgatggtagcacctccaggcccactggaggcgatggtgatggcgatggtggtaccatgctgactgcgctgcggaatgtgctcttgcaggagctggtggcctgggggcaggatggggcaggtgagggcccctcaactgcaggaggtgagggtggggccctaaagcaggaggcccagcatagggactagaagtgacaggaagaggaagccaaggtcccaaggcagcctctccattctcatatgccagtagactccaaagatgaacacggaggcctaggaggagaacgttgtagagttgagtcttcaggcagctcccaggttgacagtgtggtccctccagagttagggccacaggccgcagggctcccccaagcttacagccacttccttgtctcatttgcaaggcccccacccctgctttcgtgttctccatcccttcccccatctgcaaggatagggctgggtttcgggtgggctcctggctggtgcagatggcgtgggctgcccgcaagacctgggtactgagcctgcatgccaggatgcagggtggatgggtgaccaacagctcagcctggcagcttagcagcagagaggtcccaggaagacagggaggagatgaggagaaggaagagggagaggaggacaggacggggagggaggggaggggaggcagaggcagccccctggctttgccttgcctgcggagagcctcacactcagaccgtcctgagcctgacctcattactctgtcacatttctccctcaaacccaatgccagggctcaccacttgcttctcgcatgggtgtgatcagcttctcatcttagacctgaactctccccaaaacacacacacgcacacacacgcacacacttgccttgtcttcaacagcttgcatttggtactctccacccttactgaggaactttagtggccaggggtggggggtgatggaggacacttcagtccctcaaaggctcctccccaggttccctggttcagggccgggagtcgaagtggccccgtggagcaaggccttctagggctttagctctgacagcattctagggcctaggcgcccccaggtggggtggctccccctcaggtctaactccagcccctgccagaagcagacccgcctctgcagagaggaaagcccttggacttcagcttcctttgattcgcggtgtctttgggggattggggggtccctggttgattcccgctgcaccgtggggtctgcccttaaggtcatatgaagagcagggcccggatgctctgaggactttttcaataccctccacaggtcagggaggctgcccacttggtgagctcaactgtttggccatatatctctgggcccaccacacaaactgagaggtctcgaatgccaccagcacccgccagcccatctctggcacagcggggccagtgccgtgaaccagtctcattttccaacgtgttttccaagcactgacacggctgaggccctgctgggacgcatggccaactttcctccatgaccaggaccccccagcttccccgccacatccacagcttccccccaacatccctcctccaggtcaatgggtccttcagccacatttttggctcctgacccacccaggcctccctcagagaacctggggtctctggg

SEQ ID NO: 42918 - DNA, 1027 bp, Artificial sequence
  DNA replication origin
tggcaatgacagcaatgtggtggagcaggctgagtgagccgtgggaaggtgtctgtggcggtgggctggcttgcctttgtccttgaaagaatcagggagccaccttggactgctaagcagaggagtcacaggatccggcccccctcaggctgtggggtggagcacgagcagatgtactgggggcataagggtaggaggtgggagccaccgtgtggcagctgagcccgccaggggccaggtgatagtggctggccaagggtggaggcggggttgcgaggaggagcgggtggggtcaggagcatttgggcctcagggtcaaggtctgggggctgttcctgctctcctgctctcctgctctctgcaggagcacctactacgtgcctgtccttttcccagggcccagggcagccagagacacagccttggggtgacccccagagaaaaggaacaggcccattcttgagctttccacatgttgtctgagtgaaaacgacagcagtgtgtggcacatgggtggcattctctggggacatgcgcctgcagctatcttatatgtcagtaacaatatggggcctttcccccttaaagcttggagaagaaaaaagccccattttccatgccctcttcctgttgcccgcaactcttccctagaggaaacccatcttattttaatgctactgaaacctcagaggatctggtcccaattaaatgacttttcttgcagacgctttggtgagcactaaatgcttgagacctggtgatcctgagcgagagagcctgctgcggggtgggggtggagaagaaaaaggagggaaggggaacacaggaccccaaatgggacaagggtggctgcggatggggtggagggtgccagtggagggggactgcagagggtggcacgcagcagggaccagcccatagggagcagggccgtggtcgggatgggggcagaataggggccagtttcccaccctctttgcccgtgtgaaattcgagttcattcccgcccatagcgtggcttcgctgg

SEQ ID NO: 42919 - DNA, 1212 bp, Artificial sequence
  DNA replication origin
tctggttcccattagctgggctgggggtgggggaagcctgctcccaggtttctctggcacagccagcctggaggagggagggactccgctcctacccacctaggcaggaaggggtgaggcctggggtgctctcagttcccagctcccatggaggcctggcctcgctgcccttcccctggtcgggagcctggtggctgacctgggtgggcccctggggagtggtactcctgctgcccactctgtccagtcccagggcacccggccattgtggggaccttgaaggaacccccatggagcagagccagccttcaggggctcagcagagccagaggctcccggcaagtttctgccttgccctcccccccgcccaagagctcactgacggacttgtgctgagacaggcaggccccaagccaacagtaatcccgagcccggtgtctggagcagagggtgggagggctgttgggattttccaggaaccagggatgcagcccgagggttgctggaaagagctttgggctcccagttctgccatggacggactggccatgtgacatcaggaacaagcttccctccctcctcagtgccccagtcttctcatttcagtatggtggaaacaggctccttagaaagttctagaatctgagagccagaaggcgcctagagaagctggattacatgatcaaggtcgcttctagttgtacaatcccaggattctaaggtcaaggaagggactcctgtcccttgtcctcctcccccttcccttccatgtagcccactcttcacacactcatgcacacacataccctctacaagctgggactcagattggtagcctggaggatgccaaagcaatgctgtttgtccctcaaggctgtcatcaacgaggactggacagtggattctttgctcactgacaggggatcaggtgaggaccgtgagaaagtgacatttgggcagaggcatgagtgaagaggccatggccatgcaaaaagccacagaaagagccctccgaaaaagagggatggccagtgcagaggccccaggtgagaaagggttgggcccaatttgagcattggcaatgacagcaatgtggtggagcaggctgagtgagccgtgggaaggtgtctgtggcggtgggctggcttgcctttgtccttgaaagaatcagggagccaccttggactgctaagcagaggagtcacaggatcc

SEQ ID NO: 42920 - DNA, 912 bp, Artificial sequence
  DNA replication origin
ctgagaccccagtgctgcttgggcatgggtgtgcctcgggctgggctggctcctggttcctctgcttgccctccaggtctctaccttctcctctgtaaaatggggtagggggcagagttgacgttctgtggctgtcccgaccccctacataggagcatgggtgttccaggcactgcctgggtgaagccatgtcacaggtcccccccagacttcttggccaacagtctgggatctctgatgtgcctaggctgcacgcatccttttggtcagaggggcacctgtgggtcaggatgacatgaggtggaaaataggctgggctcgatgaggggactgctgggtggggccagaggggcgtgtggtggagtgaggggcaaataagggggtgtctggctccagttcctagagcccgccaccctcagagggctgccggaagtccctgctccaactggggtgtccctgcagccccaaccccgcgttctgctgtgggagccagggtttgtgggagcaggcaggcgggggctggcagagaggactgatctcaccgctggctcggctcttcagggccagtattgaggaagcttttcctacagccctgtccagcgttgacttaggtttggaagcgatcttaagaaatgagttaattgtgggcaaggcttgggtggaggggagaagggaagcagtggaggaggggcaggggccggcaagggccatcaggcaggagtctccatcctggggcaatgaggcaatgtgtgagatccagaggggtgcagggctggtcaaggtggggaggaggcctggcaactgggtcttcactgggctccttgaggagctgccgctccagctaacagtcccgtaggagccacatggggtcctctgctatatccagggtaccctcgccatccagggctctgg

SEQ ID NO: 42921 - DNA, 1035 bp, Artificial sequence
  DNA replication origin
gctggattgggggaggatggatgagccccgactcctgccctcggcctctgcggcctgtgggtaaggagcccaaaggccagcctgtcctagcccagccagaaggcagggcctcctggcctcagggtacctcttcctctgtgtgctggcagggtgcgggggtggagacggccacaggtgtggggtcgaggaggggggccctacctgatcctgttgtggctcaggcccagcacctgcagtcccttgaggcccaggaggccgcgtgggatggcctgcacctggttatgatccaggagcagctccgccagcgaggcgcgcaggcccaggaaggacacgctgtggatgccgtcagcctgcagcctgttgtgggacaggtgcaggaactctaggcctggcttcatgtgcgcgaacgcgtagccagggatgcgctcgatgtggtcgtggtgcagcgtcaggcgcctcaggccccgcggcaggaagcggggcacgtgcaccagccggttgtaggacaggtcaagggtctccagcttcctgtggggcggggcacacaggggcagagggagctgacggttggcaactcctagaggggagttccaggggctgcagccccacactcccaagacgagcgtggggattcactccgagatggcagccgcaacccgaactctcaacagctgggactctggcaactcctgtgtgagtcaggccaggccctgtgtgggtttatgtcctcctctgtcccccaaggcttagggattagaggatctgggtgggggccttccttgctccctgcagggctagcgatacctgctgtcattgtggagactgaggaactgtcctcccactcacttccttccctccaggtgttgcctcagggtctcctgtctcctaatcctgacacctgacagagctcagagggtgacgcctaaaatctaggggaaaagtggggcaggggagctctctgcccctgccggtcctcggcctcgaagccctctcctctgtcccttccactctcctgccctcatcctgcctctccca

SEQ ID NO: 42922 - DNA, 1315 bp, Artificial sequence
  DNA replication origin
ggcggccccgccagggtagagaaaggccggggaatgggaaggccgtgcccagatcgagatgggggtgctgaggtgatggggtgggatagcgagggccagaggggcatgctggaggctcacaagttagagggacagaggacagggacggagccatgcgctccttggggctgggctgtgtctctgctgggccctctcctgcggcatccttcatgcctgtcacctggctgtctctgtgagccccatcccagggcagtggctgtcgtgttccctgcggttgtgaccctttgtccctatcccttcctggcacagggcctggtggcctagagagctgtggaggctgtcccaggaaacccatccggttcccaggggccccctcactcaggcaggccaacggggcaatggcctcagtggccttcgagggctccgcagacccagtgtctccaccagcatatctggccagtctgtcttcagggctcggcagggctgagttgtcacttcccagggactcctggcacatggggaggtcaacatggagggccggcctcgctcaggcagacagtcagaaactctggccaggggtggtccttgcccagtgctcagggcggggcttggctttgcacagaccacgtgctcactccccacccttccctggcaccaggtcagataggggcacagcctggtctcacagcaagccagccatacatctctgggcaagttactcatctgtgagctgagggtggggccctggggacctctcttgcaggtgggtgtgcatgttgggggctgggatgagggttctggggccaggaatgggggggaggtgtcaagggagaggcaaaggggcttcccgagaggtgccactgtgcggtggtcaccagcccctgccccaggcctcagtgcaggtgtgggtggctctaggaccaatggcaggtgccctgaacctccacaccctcctgctctgccagccaagcccacctctttgggtccaggcccaggatagggatgagacggatcaggtgcagatgctgccccaagcaagggtggggagcctggcctcttgatggcttgggaccgagcaaggacttcaggaccctggtgaggcagggtgggggtggggaggctctcagagaagctgtgggacccaagccctctgaatctctttgctgacagtctcaggtgcagcccaggaaccgcacggacatgggagagccaggacatgcagcgtagctcctggagggagggaggctggctggtgagcctgcccaagctgcatttattatgttcaagtacaaaccagtgccacctttcgcccctg

SEQ ID NO: 42923 - DNA, 1230 bp, Artificial sequence
  DNA replication origin
gctcctggccctctggggaatcccctgggctggaaacagcacccttgtcccagtcatgagggggaaataaaggcccagtccctttgccccatctcggagtgcaggttggctgaggcctggccgggcctgtggggtcggctgcagcccagcttctcccttggccaggtgacgaccccaagagcccgcaggtacatttcccaagtgcgagtcccctgcctccccagttgggaaggtcacaggaggattagcccccgccgaggctctgagaagtggaattaaccacctgtgggtggcctgcctggcccctgccctcctgcagctgaggggcccctccccttctcctccccacctgcctcatctgtcgggcagtggtaagaagtgggcaggagatgtcggggactcacccagcctgcacttcctgtgcctcccgggcctgacctctgggactgcgagaaggtgggggctgcagggtgacctgagcaagaggcgcagggaccggggcggccaggcagggaggaggggtcgtgagagctgggagagtggggccagcgcctcgtgggctgctgacctctgacccagcccaaacaggaagtgccatatctgaggggccagctggaggagaaggaatgccgggacgagtccaaagcaaacagcccacagcttcccaggcctctcccgcccccgccacagtctggcgctttctccactgagaactcaggggtgggggcaggggtagggggaatcggccatggaatgggagcaaggcgagactcagttcccaggccccggtcctaggcagagctgatggcggggcgaggtccttgcagcggacaccctgtgcccttcctcctctgctccacccacatccagcagcccggaggcagaggggaaggagaggggcggccccgccagggtagagaaaggccggggaatgggaaggccgtgcccagatcgagatgggggtgctgaggtgatggggtgggatagcgagggccagaggggcatgctggaggctcacaagttagagggacagaggacagggacggagccatgcgctccttggggctgggctgtgtctctgctgggccctctcctgcggcatccttcatgcctgtcacctggctgtctctgtgagccccatcccagggcagtggctgtcgtgttccctgcggttgtgaccctttgtccctatcccttcctggcacagggcctggtggcctagagagctgt

SEQ ID NO: 42924 - DNA, 1077 bp, Artificial sequence
  DNA replication origin
atggaggaggcttgtgccaacatgccctggggcagctgagctggtgctgagtgagcggagcctccactctctggaagcttcccagtgctggatggccgaggtgtggctggtgaaagctggcactctccatgccaggagctttttttgaccttcctctgaggacataatcacacagcatctctcccctccgggccaccagggctgtaatttcagggcctgcgtgggggctccggggaggcctggcctgcgtctagctatctttagagaggcatggtctggggcgtggccagaggatggaagatgggttgccttggaagccgaagtccgggagccagaggccaggggcaccctaggacccctgtggtcttccctcagggaggccagaggccagagcccaggagcagcaccaggaggctctggtgggagtgggaaggggctgggccctgtcccgagccctgacttcagctcggagcaatctttggcccagatgctcagaagatggggtgggatagcacctggcctgagggccagacagcttagcatctcccagactgtccccgtgtggccatggtggcagctattatgggggtagggggtggagggtggcacagtaggcgagatgcttgtgaacgggggtgttaggctggagggagggctcagaacagaatgtggcgaaggcgaggggtgggcccgtggggggccagtgaggggcagttggagaagaatttggaagctgatgggcagttttctgggactgcagctggcagaggcggagcagaggtgcaaggtcccacccaggtctcaggccggagacacaggcccagccccagggagggcacggctccttgcccccattctccacccttctgaattgtgagctgtccccactgtccttactctcagtcccaccccatcacctcagcatccccatccccatctgaggactgatgagtgcctcccttctgaccctagtcacacctatcctgttgccatcactattgcaattgtcactgcaatgtcccctcagatgcccagcattttggggtcaccgattggctgcacccactgctgtaccct

SEQ ID NO: 42925 - DNA, 1077 bp, Artificial sequence
  DNA replication origin
gcagtgagggggcgctcccctccgtgggccttccagggcactctctcgctccctctcctgggtcccttggcaggcccctctgggaccccaagccaggtccgccctggggagcatggcacagttgcctgattttctctccttcccctccacacccattctgagtcccagtccaagggggtcctggaaacagacagggctgagccacccaggcacccccagtcagggcccttgcagccagggctcccaggacccagacttctcacagaggatgtagaggcagagcattaacctgggggtgagcgagcgaggaacatctgggcagggtgcctggggtgtgcctgggaaactaagtctttcagcccatgccaaggactggcctcaggcagtgcagcggaggactgctcctgggtgctgagctcggtgggcgctgggcggtcctccccgatccgacccaacccgggccaggcgccaagccctggagcaaggaggcgcctgggcagagcgaggctgagggagtggagcatgcgcctgggacttgcaatgatgaaacagggccattggcaaagctggggtaccagtcacccagccacgctctagggtggtagccaagaagacggaccccgagcgggaggcagagagacaagaggtggatgaagcagagcaaggtcagaagggagagggagaggaaggggtgagggaaaggtgcctggagggcggcgagacgaggcagaagcctgacagggaccaagggggccgcagggtggcgatgaaggggcgtggatcagcagcctacagagagcaccggggaaatctgtggacaccctcgcggcactggggacagcaggaccagggcttgggacagcggaggcagcagagccaggggcatctctgggttgctgaggaggcagcttgaagccagccctacctggagaggggaggcgccaggcgcaggctgactagttggcgggctggggtggtgggccgtccgcacgtctatctgtccggtgtgtccggcggaccgaaagcagctactcactcctgggcagtttgtggagagagggagacagaggcggcggg

SEQ ID NO: 42926 - DNA, 1106 bp, Artificial sequence
  DNA replication origin
ccccacccctccagaggaggtggccccaggccttccccagggaaccctgggaagctggttctttctggaaggctgcagaagggcctggccatgggtcctggaggccacttaggctaggcgggcctcaggccaggaggactgagccatgcgccctccccacagcgcagcccctctgcacacaccccacagctggtccctctaagacttgcggaaagggctctgagtggccgagctgtggcccctgatctcccaacccagcatctgagcagaagaggacaggagctggggcactgatcgccccaggcccggtcggcagggtgggggccagggccggcaggatcccgggttgcgctgccttccgagggagccggtgcccacccagcggcctgcagcccaaggcagggtgccctgggaaagccaccgccacccccagcccctcggtgtgagcaagacccccagctggtgggtccccacccaccagtggggctcccaggcctgtcgggggctcggtggtgggcctggatgctaggggggcaacgtgcggcagggaccaagctctccggcccacagatgagtgggagggggtcgtggtgggcatgggaagacatttccgacaagcaggggtgttggggggtgagcaaggcaggggaggggccctggcaggtggggtgccagggaccccagggctggggctaggcctgtgggtggggcgtgtgctggggattctgtgggccgaggacatgtgactcccgggcaggctggagatgctggggggtggggggtggggggtgggcccgggaagcacaggagacggcaggtggggaggtcctcatcccacctctatacggggtggcaaggactcagaagcccttgctgaaggctctgagtgctaactgtcaagtgtgaactcattacaaacccctcctctggggacttggcgctgtcactggaagggacacgctatagctttgtttgagtgactctggaatgttgctaaagacaggaaactcattcttgccttggaaacaccccccttcctttcccagactccccatctatgcgttggtagggttaatgcccactgccgtacgggtccttggggcttg

SEQ ID NO: 42927 - DNA, 927 bp, Artificial sequence
  DNA replication origin
acagtcacccacacatacatacacacgaacatgctcatacacacccacacacatatgcacacgcatacccacacatacactcacagaaacacacacatacacacacattgcacatatacacacacatgtacccccccccccacaagaagccatgtgattgcagaggcaaagtggagtgaggtggccacaagtccaggacgcctggagccttccggggctgggagaggcaggaagaagccttccctagagcttctggggggagtgtggccctgagacacctggatttggacttctggcctccaggactgggagagggtccatgtcctctgtggtgagccacccggtttgtggttatccatgacagtggcctcgggccactcatccaagccccagctgggccaccgaggagctccagctcggcagagccctgtccacagcacaactgaggcttcttgggctgcttggcttgagtacatccacgcctggtggttctggaaagctggctggcgatgcagagtgtgtgtgtgtgagtgtgtgggggtgtgagtgtgagtgtgtgagtgggtgtgagtgagtggatgtgggcatgagtgtatgtgagcacgtgtgtgggtgtgtgagagtgtgtgtgagtgggagtgagtgtgtgtgagagagtgggtgtgtgtggggtgtgagtgtgcatgagagcaagtgagtgtgagagtgtgtgagtgtgaatatgtgagtgtgagtgtgtgagtgagtgtgagtgtgattgtgtgagtgtgtgagtgtgtgtgagtgagagtatgagtttgagtgtgtgtgagtgtgagcatgtgtgagtgggagtgtgtgtgagtgtgagtgcgagtgtgtgtttgtgtgtgagtatgtgagtgtgagagtatgtctgtgtgtgtgtgtgagagagagagacagaga

SEQ ID NO: 42928 - DNA, 1242 bp, Artificial sequence
  DNA replication origin
acacacgtgctcacatacactcatgcccacatccactcactcacacccactcacacactcacactcacacccccacacactcacacacacacactctgcatcgccagccagctttccagaaccaccaggcgtggatgtactcaagccaagcagcccaagaagcctcagttgtgctgtggacagggctctgccgagctggagctcctcggtggcccagctggggcttggatgagtggcccgaggccactgtcatggataaccacaaaccgggtggctcaccacagaggacatggaccctctcccagtcctggaggccagaagtccaaatccaggtgtctcagggccacactccccccagaagctctagggaaggcttcttcctgcctctcccagccccggaaggctccaggcgtcctggacttgtggccacctcactccactttgcctctgcaatcacatggcttcttgtgggggggggggtacatgtgtgtgtatatgtgcaatgtgtgtgtatgtgtgtgtttctgtgagtgtatgtgtgggtatgcgtgtgcatatgtgtgtgggtgtgtatgagcatgttcgtgtgtatgtatgtgtgggtgactgtgtatgtgtggggtgtctgcatgtgtatgtgtgcaatgtgtgtgtatatgtttctgtgtgtgtatgagtgtgtcttgtgtgtgcatgtgtatgactgtgtgcatatgtgaatgtgtgtctgtgacgatgtgtgtgtatgtgggggtgtgcgtatgtgtgcatgtgtgtgtttctgtgtgtgtctctgtgcatggatgtgagtgtgggcatgtgtgtgtgtttctgtgtgtgtgtctgtgcatggatgtgagtgtgagcgtgtgtgtgtttctgtgtgtgtgtgtctccgtgcatggatgtgagtgtgagcatgtgtgtgtgtgcatggatgtgtgagcgtgtgtgtgtttctgtgtgtgtgtgtctctgtgcatggatgtgagtgtgagcatgtgtgtgtctctgtgcatggatgtgagtgtgagcgtgtgtgtgtgtttctgtgtgtgtgtgtctgtgcatggatgagagtgtgagcgtgtgtgtgtgtttctgtgtgtgtgtgtctccgtgcatggatgtgagtgtgagcatgtgtgtgtgtggcggggggggataacccaggataacccacatctcaagattcttcacttgatggcatctgcaaagaccctatttccaaataaggctgca

SEQ ID NO: 42929 - DNA, 893 bp, Artificial sequence
  DNA replication origin
gtgtgtgtgtttctgtgtgtgtgtgtctctgtgcatggatgtgagtgtgagcatgtgtgtgtctctgtgcatggatgtgagtgtgagcgtgtgtgtgtgtttctgtgtgtgtgtgtctgtgcatggatgagagtgtgagcgtgtgtgtgtgtttctgtgtgtgtgtgtctccgtgcatggatgtgagtgtgagcatgtgtgtgtgtggcggggggggataacccaggataacccacatctcaagattcttcacttgatggcatctgcaaagaccctatttccaaataaggctgcattccggttccgggggttgggacatggacacatcggtggggacatttttagcctgcccctgggctgcaagtggacacgggctttgcccctgaggccttggggaaggggctgggacctcagccagggagacagtgggcatgagaagacgggatgggggccccaggcccagccaaaggggtcctcacttcagagctggccaaggagctgctgtcccaacagtggcaggagggaacctgggcaaggagggggcatggcccagaggcctgggagaggacggacctggtgactgggtaggggccaaggagccaggagagaaagcagttgtgggaggggagcgggactgaaggggctggaggcaggtggagagagagaggggtgagagtggggatgaggcggccaggtggggcggtgggcagccgctgagagcagggtgctctctgtggcttttgtttcccaggcagtcgtcggcaatgtgggagagtggggtggggacggaggcctggcgtgccctaaggaggcaggtccagggcatggtgggacaggctggcttgggacctgggagggagctgggaagcagagtggtctgggcctccctgggt

SEQ ID NO: 42930 - DNA, 1943 bp, Artificial sequence
  DNA replication origin
cgcgccttgtgcccgcgccgcgcccgcgcccaccccggcggcgcccgcgcgcccagagcaccacttacccgggcatgggcacggccgccgccgcggcctcggctccggcgggcgctgtcgctgcgggcgggcgtcaggcgggcaacgatccgctccaaggatggaaaggcctgggcacggggcggcctggccggcggcgcgggacgcgaccctctgcggcgggcgagggctgcggccgagtgctccccacgctctgcaccggcggcgggcgacgcggcgcgctcggctccaaccgcagctctgagcgcggagggagggaggggggaggggagggagctgggtgaggaggagggagggaggagggagcgggcgcggggggcggtgcgcggcgcaggggcctcggggctcaggagctacgcgcccggtgcgcgcccttctgtccccaggacgcgcgagggtgcccgcccttcctggcctggcattgcccccaaagggcactggccgagtgggggtgggtggggatggaaactgggggaccatggcacctgtgagtgcagagagagcaccctgagcttgcgactgaggctgccactacctctccagaccctgccctctaggtgcgtctccccaacagtaaaatggggcacagagccgggtggctgatgtgtagcgtggggtccttgggtcttgcctcagtggactccaaggcattggtggtctcctgcaaactccattacctgttgagagtacgggcgtccaaatgcgtcttcccagaggaagcggcgcttaccggagatcctcaccgtcggttatcacgggaacaccaccgttaggcagaacacagagactgcacacaggtgggcaccagagacagacacgcaggggcacatacatccccggtgtgagtggagacagacacacagacaaaccccagtgcagacacctgtccacacccacaagcacgcgttcccacctacctggaaagagacccccgtgcctgccggtggacccccaggcttcccagctccaggggctgtggaggcctctgaccccagggccggcctttgcgagcattctgagcagcgagcagagaatgctcgctggggcacaggtagaggctctgggcgggagcctgaggcaggtgcaagaggcctggacgcagcctcaaattctttcttgccttggacaaagagggccctggacatgctgtgtgccagaccagagctgaatactggggacacagcagggaccacaaagcagggagtggccgtcggatggcaaatgtgctcacgccgctggggtcggagctatggaaccccattgatggggagccatgaaagaggctgctggcggctcagggaaggcctctttgaggaggcaccactgtgctagggaccaaaaggacagaaagcttctgctgcccctgagaccagggaaccgtcacaacccccacagactgcccctcccttccacaggaagcagctggtgccgtggaaagctgaggttcgcgcacgcacgcacacacacactcatacacctggtcatgtgtgcgctcacacatgcttactcacacccactcacatgcacgcacacatactcacacctgctcatatgcatgaactcatgctcactcacctacttacacaaacacacactcacacactcatgcacacactcacaatctcacgcagacacatcctcacagtcatatgtgctcactcaccctcacccacacaagctcggtggcccacacagttacacaatggttcacacatatttacatgctctcacacctacacaactcacacacttacccagtgagcacacacatgggcacatacatacacacacactcacacacagttactcacagtcacactcacacacacactccccactcacactctcacacatattcatttgcacactcccgcagtcccctt

SEQ ID NO: 42931 - DNA, 2477 bp, Artificial sequence
  DNA replication origin
gcggcggccgtgcccatgcccgggtaagtggtgctctgggcgcgcgggcgccgccggggtgggcgcgggcgcggcgcgggcacaaggcgcgggtggggatgggaggatgacccggcaggtggtgcggcggcaggtagggggacacgggtccccgcccgaggcacctgagccccgcgccgggcctgcgtgtccttgcggcactgcggccgcgcgtcaccccggggccccaggccggcgggcagcgccccgcaccctgcaccctgcgccccgcatcgcgcgcgcacgcgcatccgtgtctgaggaacaaggcccttgggggctgcgggccggggctcagggtgggcgcagccgggggcgcgggatctgggccgggagcccgccagtgcgcacgcaccttcccggagcctcgggcaccccctcccccccgcgccctcacactgtatcatccttcccctctcgccttcccgcaccgttccccgcacgcccacgcggctgcccagcagaccccaccgcggtcatgggcagtgcccacgagaagccgcccggggccgcacttaggtaacttctccatccctccaggaacggctgtctccccctcctcgcctgtgtgaccttggccagccagcttttcctgtggccgcctgcgttttctcacgggtgaaagctctggctttaagattctggaatttggaatggcaggtgcggcatctcccagagcctgagacgatgggcttctctctctgtgacctggtgtccttccttctgctggcccttctgggggttggtggctcagccagccggctgaggaggggtgggaggcagggcaggggcatggcgccggggcaggtcaggactggagggagtcttggagagcccgcggtgagggctccatgagggtttaggagagactgtggaaatgctccttcgctcactcaaggggcagggaagggaccagaattcctcaacgagatgcttgccatttcctggcgaggtcatataactttcaaagatgaagcccagggcctccgacctcaaaggagtccctgcctgctaaaggatcaagtccagcctgtccccaactggcccccatcctgaattccactggcaccctaaacgtcagccgacttcccctggctgacttgggcaccagtctggcaggcaccccctgcacctcctcccctcctttgcccactaggatctgtgccctcaccccctgccattgcccctcactagtcagtgaccatcttaaggcaaggactggctcttcatttgcacaggcctggcacagagtgggcacctggtttctgcatggcatattcatgaccttgacctcactgaatctgcagactcactgaacaggagaggcaaggcctggatttttgtccccatttttcagatgggatcattgaggcccccaagaggagaagggattcagccctgaattgaggccccttccttcatgagcagatggctagggacattcctatgaacctggtggggcagggaggcggggagaggttatcgtaataatcaaagaccagccccacttcctgagctccatctgagtctcacctcaaccacacgagtgaatggctgttttcatccccaacccccaccccccgccgccacttttcacagatgaggaaaccgaagccatgtggctcattaaaggggcactgggatgccgaggagagggctggggatgcctgggcccctgtgggacacagctgagacccagcagagggtcccagggtgaggtcagcccctcaagtctgcgccatcggaacgggctgggaacttgtggtccccggccattgattgtcactgctgcaggccccgaggcgggggacagccaaggacacagccagtctccatcagctccacctgggccgtgccctgcacggccaggtggtttgagtgcaggagtaggcatgctctcacacagcagggggtaacgggcagatggaagtggggcgggcgtgggagggggccttgcacagggccagaaggagagccggtccctgaggaaggaagcccctaaggcaaagagcatgccaggggacagccacaatgccaggtgatggagatgccccaatcggcccccgaggggcaaggaaggggccagaggaggctcgtgagggtgcctggggcttcagtgacagcagccccttacctgatggtctttgtgaccttggccaagtcccttctccattccagatccagggagggtgggggtgggcctgggggagctggagcttcagaggttgaatcattcactagcaggagaagccaagcctgtgagtcagtgagtgctctccatcccagaacgtctgctcccagcccagggatgcagccacggagtgccggggtcagccgtggaggaccctctgagaatgtcttgtggaaaggggcgccttgcctgcccggtagacaggatgagggcgccccagagccccaggggcttctgagagctgagt

SEQ ID NO: 42932 - DNA, 1876 bp, Artificial sequence
  DNA replication origin
tcggtggcaggagcaacacttggagaccaggtgagtgggctggctgcacagtcccgtcccagtgcagagggaggagagagcacacccctggggctgctcagggcatcctggccacagacactgctggcagctcagcccagccacctagaggagaccttagcccagcatgggcataaggatcacctgtgagtgggcgccccgagtccactctggccagatgagaaaactgaggcccagaagggctgactcacctgaagctctgggtcccagtcagtgtgtttcccaggccagcttcctttcagccaagcctgaggacctgggagacagagtggtcggctgagggccagaggcccggctctcctctcagccccggacagctggcaggtgccgacaccctggggccagcatgagcctggctgtgagacgcaggaagcaggagaaggggtgggaggagcggggaggaggccagccgtggcccacggaggacaggagatgtcggccaatgcagcagccagctctaggtgctggagtccatggggaacaaggcaggtcctgaccctcaggaaggtcacaggcagagatgacccaggcaacgccctgtgcggagctgggtttgggagggcagtggggggacagcccgatggctgcagccctgggttgaggaggtggcagcaggtggggcacaaagctggaggggcccagctgggtggggcaattgtgtcctgacgccactgggaagaggagccgtggcgaatggccttgggctggcaagtgaggaggagcaggaggaggcagaggtgatggcggtagtgccaagagccccagtggatcggggaccagagtagtgagggagaaagacgagtctgctctccccaggtcgctgcgtcggtcccggggcagaagagggaggtggggtggccaggattactctgggccgtggagtgggtgcggccagagcttggcagggagggagatgaggaagtgacagaagcagaggagtggggagaggagggagccggagtgggggacacaccaccaccatgtcgagggcagcaaggatgaggagcacaggacccaccagggaagaagggagaggagccgtctgctccaggggagaggcagggagggtgctggagggacagatggagcccgaacaggcgcagggctggctggtgggaggagagtgcatggggcttctgggcctccctaagggaggtaggaggtggctcggacaccagtaagcagatgagtcagctcagggttctggaagattcctcgggccacaggcctctgctctcaggtattatttggggcattccaggaccagtcaccctgtctgtgtgcccaaaagccttgtgctgtgtctgtcctcccttctcccgagagaaccatctctgtcccacctagaacagtgctggagccaccccacccaccccaagagggcctgggcttaggaggcgagagaagggaagctgatagacttggaaataggagagctccactgaatcccgtctcctctctatggtgtggcatgtctttcccccacaaaagccccttataacgccttctccccagccaggcactgaccttggccatggggttcctctgtgtgcagctaagaagcaggatggtgcagtggccatggagatgcagcccctgaagagcgcggagggtggggagatggaggagcgggagaagaagaaagccaacgcacccaaaaaggagaagtctgtccttcaggggaagctcacaaagctagccgtgcagatcgggaaagcaggtagggacagcaggaggtggtgggcccaggccattgactgggcgtggaggatgctgggctcctggagatgagcccaggctgtgtagagcaggtggg

SEQ ID NO: 42933 - DNA, 960 bp, Artificial sequence
  DNA replication origin
gatggactggaggtggtgctgaagcctgaggggacacaggtttggggcacagggtgggcgtttattggttgagggtttggctggggctactctacggtcaggacgtcctgtggcgagctcacagcaaaggtcctggcgggaaagggagcccagaagcatatccccatatggacgatgccaccaggggagtccagatgaggggacctcgagggccgcgtggcagatgccatggccttgacactgggaagtcactttgttgttgaaagatcccagaccctggagagtgtggaggatggccggccccggagggagaatgcaaggcatggggtgcccctctgtctccccagggcctctgcatggcacccacctgtgtcacaagcagggccactgtgaccctgacaacttgtctttgtaggagccaccctgggggtgcaggtgcaacctgggaggagaagcttctgggctctccttcgggagacaggcattcatgtattggatcatgtagcaaaaacactcaattcaaagacagtgcgtctaaacgccagccatggctcatgtcaacagagcagccccgtgccccgaggagaacatggtcactgcgcccagagagggagcacctcgagcttgccctgggagaaaatgggtggtagcggaggacaggggacagaagtccagcgagggaaatgggccccgcaaaggcgggcagcggcatgagtcccgggccccactgagcctgggagagcagaaggagagggtgctggtgaggcgaagcaaggccacacttggggacaggagccatcgagtccctctgttggaccagggagcaactgaagcacagagcagaggaaggaatcttgccagaggggcctggggaatagggacagctcctttccagcttaagagtggctgagagagagtccaaggggtagaccacagtgacagggccaggctgcggaggct

SEQ ID NO: 42934 - DNA, 1149 bp, Artificial sequence
  DNA replication origin
cagccggctgggcattgcaaagtgggcaaagagctatggggagggccgaagccagcacaggaggctggtgcaaagccgtgtgggccccagacattcagccccgtccactgagcccctgctgggtgcagcgagccagacagacagacccctgccccagggggattaccttccagtgaaaggtggatggatgtagggggcacttgaaggaaggagcagaagtgggcaccatgctgctggggaagacaagagtgaggggagccttcctggtgtggggtgcagccacagcaaaggtccccaggtgggatgtgccggaggctgaggggtaaaagagggcagagtgagaaagactggggccggctccgagggccacagccagtggagggcttgtagcgggggagaccaagacacgctctggttttcgggccgccgtgctaagggcatggaggggtgggggcgaagtgcaggttctggatggcgtttgaagggagccacggggctggggccgggggggttgggcctgctaagtttgagacccagcttagatgcccaagtctggagccggagccgagaggctgttagccgacaggtggaatggaaggccgagagccagaagagagtacctagacccagaggaggggccctcgggtgtcagggatgggagaggaggaggggctggagcagtgtcggacagcgctgggggactgtgaggagtaaaggactgtggcctctcagggccatcagccatgatggggaacggagaagtgtggcagagggagacagcaggaggacacaaggaggtggggacacacagtggggagccacctcgcctcacccggatgagatggggagtcctccagcccaacctgaccctcctaggggcatctctcccggaagagtgctttcatttcctttctttttaaattgtcacagtaaaacgggcttttgggggtacagttcaatgaatttccacacagtcaggacacgggccagttccatcgcctactggaaggtttagagccagatgggggaccaagagtctgacttggcagccagagagagctcggaaactccacctagagaagggacaggaaggatggagggctttgctggtgggggttggggtcccaatgtgaccccagggccccaggc

SEQ ID NO: 42935 - DNA, 1424 bp, Artificial sequence
  DNA replication origin
gccgcgagcacctccagttctgccggcttctgcgcgccggggccgcctctccttccgccggtgccgcggcgcctcatggaagccccggagggcggcggaggggggcctgcagcgcggggcccggaggggcagccggcgcccgaagccagggtgcacttccgagtggcgaggttcatcatggaggcaggtaaccgcggccgggggaggccaggacaggcggcgccgcggcccgcttcgcggagcgggcccggctggccaggccggccttctggagtgctcaccgtagcagaggccgggaagccctgctcggggctgaggacctccgcctttgcgccgcgcccggtgtgctgagcagtgagccgcgaggtatccccatggcgtggaccggtgtgcaggccctaggagaggacgtggccgggttgggcctccagcgaggcggagaccggcccgggcgcccgcagctctgcgcagtgcgccacgccttctgccggcacccgcggccctgcactccggtagactttatggcgcttagtcgcgcggagccttttggagaacgctgtccgagggttcctgtcactccggggacctaggctgcttgcagctcctgttccgaaccctgccaggacatccacagtagtgttgggctccgcgcttcccaggcgaggtgattaagctaagatctctgtagaaacatcgtttccatccagccatcaacagtatttttttttttttcgagacggagtctcgctctgttggccaggctggagtgcagtggcgtgatctcggctcactgcaacctccgtctcccggactaaagcaattatccttcctcacgcttccgagtagctggaattacaggtgtgtgccaccgtacccggctaatgtttgtatttttagtagagacggggtttcaccatgttggccaggctggtcttgaactcctggcctcaggtgatccagttgcctcgccctcccaaagtgctgggattacaggcgtgagctacctcgtccggcccatcaacagtatcttgataggagatactgttagttggcgggtagttatttcctacctttactgcttgggggagaagggttgggcagatgtgctttctacccaaggtgggcggagagtctgaggactgctgcaggactgttcatcccagtgatatgtaaatttactgtaatttgcaagaagagttgcaaagttattattagggaaggatggcagtgacacctcatctgctaccgtctgctcggagggtccgtgtaaattggggtttgctctgtaaaacaaagcttggaaggtcatgtcagtaacagcaccttatctggcatctcctggaatgaggggtcccaggtaggaattgtctttatataacaagtttagaccttctgagggacttctttataaaatgtattacaca

SEQ ID NO: 42936 - DNA, 1567 bp, Artificial sequence
  DNA replication origin
tttcagccttgggctggggaagagggtggggctgctcacagcttgcagacagacacggtgctcaaggcgtggcaggtgtcagcagcacagggagctggggaccctgagtcagtccacacacgcacacatatgcacacacacgtgcacacccgcgcacatacagacaagagcaagctgggtgatggaagtggagtggtaattccttcaccaggcagaatacgtgcagagacgttcagccaggagaccataacctttgggggacctgccgaaggtctctgccatgaggcaaagtggtgagatccgaggctggtcagttgatagggtgactccacaaggaccagcatgtgaggtcaaggcctcacattttctcctgaaggtgaagggactccggagggtgttaggcagggcaggacctgttcagcctcgccttttagaaagctcgctctggcggctggtattgtggggtgaatgccagcccccaaaaggtgtgtccgtgtcctaatccctgttactgtgaccttatttagcagaagggcctttgcaagatgtaatgaaaataaggatgtcaagatgagctcctcctggattatctaggtaggccctaatccagtgacaggtgtgcttataagagacagacgagaagacagggagaaggccatgtagagacggaggcacagattggagtgatggggccacaagcccaggaagaactcaggctgcagaagctggaagagcaaggaagaactgatcctctgccagagcctttgagggagcaaagccctagtgtcacctccatttcaggtgtctggcctccagaattgagagaggatatacttctgctgtttttagcaacccaatttgtggtcatttgttacagcagccccaggaaactaacccagctgggatggagagaggacttggggaggctggtggaggcaggaagtgctgaggaaggagaatgaggccggactgggtgtgtggggtgggggtaagaggtggagacttccacaccatcaggagatcaaggcgcctgggcagaagggtttagggagcagtagctttttcctctccatattgccagctgtctgaaattgtagcaatgatctgaatgtatcagaatgactccagtgactgtcactaacttgggagtgagtacctttggggttctatgtccctaaagcctgatgcaccatttcctgcttgtggaagacgcgaatgaaaaatgagatggtaaatacctgagttcgatattcagcattcattcagcaaacatttattaggctcctactgtgcgtcgcgctggaaaggcaagcagaagctagattcccaatcgatcccgggaggctggacgatccagacacaaacaccgttcatgcgtctattcgaaaaggccctcttggaattttgtgcacagcatttccttggggtgtcgatggatcggggtctgcaaacattagcaccttttccggtggccgctgtcttctcagacctcagacaccggcgcctccccgtgaactcccgcaggcgtccctagcccagggcttggcgggcgctgccggttgtacct

SEQ ID NO: 42937 - DNA, 921 bp, Artificial sequence
  DNA replication origin
acgggaagcagggaggatattcccgtcaccctctggaaagggcagcctatttctgggacccgagcccagttcttcactagttgtgtattttgctgtgaatttcgatgctggagacacggcgtggagggtgcggggctgaggcagggagggggagtgaccgccccccgccgcaaccccgggcccggaggagacccagctccgagctcagccccgccggatcagacccctctccagccacaccaggggagggcgggcgctttggggggcactggggcggggtctgcttcccagtcctcaacagaggggaccttttggagcgccttggccggggactgcctggggctcccagcagcagggggatggggtgggggtggcgagcttagttcgccggactcagcgtcaagcgagcccccgccgtgcgtgcacacgcgctcgcgcacctccccgcacgcgcacgctggagcggtgtggcttttggtgtagacggctctgccccctagcggcagctgcggtcagcatgcggggctccttccagggagggcttcggagaggaaggagaaggggtccagggagggaatcgcaggctgggcttggggcggaagatcccaggaggggctcgcggcggcccgctgccccggcagctccttttcacccgccaccctcgtcctgggtgacctcagtccctcttatgcctgtccagacctttcccttaggggacaacccccaggaagacataggcccctcaaactccacatgtcacaatggagcgcttctgcttcccacacccgttcctcatctcggagactggcaccttcacccacctggttggcccagacttgggagagctccttgatatctcctcttcctcctccccaacatccacctcctcactgatcctggggattctccatcccaaatagc

SEQ ID NO: 42938 - DNA, 757 bp, Artificial sequence
  DNA replication origin
ctggccttgatgtggaggatgggtgcgaggctggggccgtcgtccaagcgagaggggacagggcctgggtgaagagaaaatccagcaatgtgaggggtgattatggagagagaggaatcaagggcacccccgagtttggggtgtggagggaagaactttgggacatccaggcagcaatggagctacaggcatggaacccaggagacactgatgtcacagtcgtcccccagaagagggacataagaaagagacttgggacaagtggccagagtgagggaaagaaaaccaggagggggtgggcatgaggagggaggccttaggaggggacccaagcaagcaggggcaggtggaggaagagccttgcaggccttggagtttggcaggaggcagatgagtcccgtctggaagccgccacttctcaaggaaggcgatgccagctggcctgggctctggggaggcgggtgggagaacacacagcacccaccggcagcagctcaggagaaaccaggccaaagggggctctcaacttggaagctgtggggtggcacagaacaattttgagatgctcaggccttttagggaggtcaggatgggcaggctcaaggctggtggccaggggatgagggccagaggatggaggacacggggatgggaggagccctgggggataggtgggcttggctgaggagaggacgttctgggcactacacgtccccttttcctgaagacagcctctggacacttctctcccttgcgg

SEQ ID NO: 42939 - DNA, 1906 bp, Artificial sequence
  DNA replication origin
gtccccggggcgccgcttgctccactcacctccgctctgctcggttctccgcgccggttccctgcgtcgcggccgggaagtttccgaagctcgggcggcgggaagcgccactgctgcagcctaacgccaccggaaccccgggtggcggcctctcctggagccgaggggcagccgccgccgccgctgcggagggaaactccaaatcccgcctccgccgccgctgcctcctccgcctctgccgccgcctcctcccctccagtcgccgtcttctccgccccctgcccaggaggggcactgtagctggcggctcgcggggagggagcggggaggggccgcggcctgcccggcgtctccctccacctcccacgccccccccaccccccgccgccttcctcccacctgcaagcctctgttctctaggccagtcctgcccgacgcgccctgcgctccccggtccccagtggcgccaatgagtgggggctccggcgcttggggcgcgggagtggggttgggggccctgaactaggctgggcctgggctaggtggacggttacgcgcagaatctgcactggcaccccagcgaaggggcccattgaggactgggcgcaacttggtgccccagagccacctcctgctcccacagtgaagagggtataaagtctggctgacagcgctgccaattccatcccccaccccaggtccccctgcagtgtctcctctcattctcatgtgtcagattctggctaatagtaatagcatttgagcctcagtgcctggaaggggtggagccaggacgtttgggtgggggaggggctggaagcgagtagggagcggctgttgtcactaggtcccgttagctttctcctttgtgccaaaggtcacacgcattgccatcaaggacctcattttatccttacagcagttccggaagtctgaggggattgtccccatgctacagccagggaaactgagtccgtggctccctggtggtggcacaatagtgtagtggcagagtaggatgtggcttgggctggctgagttcagaagcctagagcctgagcgagtgtgagtgcggaagattgcgtggggaggggaggcagaggacagcccgtggagatgtgcacctggcctttctggggctcccagaccagcagtgtatgagcccggcctcgtgcctgcagtgggggattgcctgagacccggcaggaggctgtgagcatcaagggccgtcttctccgcccagggagcgcaggataaggtgcggccaggcagggctgggatgccagcagctccgctggccgcttggctgtgtctgccgcagcgctgaattcccctgagtcattacccctggaagaggcgagggcagcagctttgcctctggagcccaggtccctgtcccatctgggtctccatttcctggtatgtacgtttggggagagaggtgggaccatgtgatctccaaggaccctcctagctgtgctgcagtttcaagccatggtgcgtgagctgggagggtcctgctgtcgccagccaggcctgcccaccctgctctgggccccgactgctcctctgcaccttttcagccttggcggcagcacagcccctcctgggagcaggcctctggccctgcaactgtcttcctgctctggacgctgggcctcatgggactgcactggggctctcccctacagccttggggagtcaggctgcccaggacttgagcttgcacctacccaaggctatgccacgcaggcgagcacatgcagctgccactggtgcccgtactgctagacgtgctgaagttacggaacctttcctaagaaatcaatattccatagaagctgtgccctacaaacaggggactgcctttcacactccccctccactgagggcacctcctgtttgg

SEQ ID NO: 42940 - DNA, 1157 bp, Artificial sequence
  DNA replication origin
agggagctgctcctgcttttccttctgccgatcacacactcctcccccaccccgacacgcacaagcacacgtgcacacacagccctccccgtaacacacacgcaggcaggcacccagacagcgcgcgcggacgccagcccccatggaacccacctactacgtgcttgccgggcagctggcgcccctttggtcccacctgggccgcctccatttcagcgccgggctctctccgccgcctccccgcccctccccggggccccttgcttccacatctaagtaccctaccttggaccccaaagtgccttctttatttcttagggaagaggccaagctagtcgctggggagtctcaaggtctgtttagggaggcacctggggggcccaaggctgctgagcctctgccgaaggggagccagaggtgcctggcagggatgccaccaaatgctgcagcctctagagcccgcgtgccaggtgttgggggtgagggagggagggactcagagatgtgctggggggtgtcgaaggctatttgtgatgggggcggggcaggatgctggagagcgtgaatccagcaggtgtgcgcgcgtgctggggtggatgagagtgcgcgttggagatgctggaggtgtgtgcctgggacgtggggagcgtcagccactgggatgtgggtttctgacgggacctcgctccaggatgggtggactgcagtgtctctgggctggcaacgtgggtggggtgtctgtaatgggcagatggggagttcgaggtggtgggggcatggtagggggagctatgttggtgcaggtatggcagagacgtgttggaagcgtgcgtgtgcgcctgggtgtgtactggggcgtggcagggtctcggtgggttggcatgagttggggacagtggtgagtggtggggcaggggcagctagtgtgtgcactacaggcacccgggtctgtggtgcgtggtttgtatgcgcgcgagtgtgcagccggtgcaagtggcaggagacacgggaggtgcacgggcggcgtgcgggggtgtgcggagcagcaccgaatgggtgtcgtaggggcgcgtgcgccggcttcgtggggtgtgcgttgtcaggactttgggggtgcagggtggaggagcgcacgtcggggcgggggcagccaggcc

SEQ ID NO: 42941 - DNA, 754 bp, Artificial sequence
  DNA replication origin
tcccgtcagaaacccacatcccagtggctgacgctccccacgtcccaggcacacacctccagcatctccaacgcgcactctcatccaccccagcacgcgcgcacacctgctggattcacgctctccagcatcctgccccgcccccatcacaaatagccttcgacaccccccagcacatctctgagtccctccctccctcacccccaacacctggcacgcgggctctagaggctgcagcatttggtggcatccctgccaggcacctctggctccccttcggcagaggctcagcagccttgggccccccaggtgcctccctaaacagaccttgagactccccagcgactagcttggcctcttccctaagaaataaagaaggcactttggggtccaaggtagggtacttagatgtggaagcaaggggccccggggaggggcggggaggcggcggagagagcccggcgctgaaatggaggcggcccaggtgggaccaaaggggcgccagctgcccggcaagcacgtagtaggtgggttccatgggggctggcgtccgcgcgcgctgtctgggtgcctgcctgcgtgtgtgttacggggagggctgtgtgtgcacgtgtgcttgtgcgtgtcggggtgggggaggagtgtgtgatcggcagaaggaaaagcaggagcagctccctcaggcaacaattggtttcattcattcatgccttctttgttaacgagcatttcttccgcgagcgccgggcgcgtg

SEQ ID NO: 42942 - DNA, 1026 bp, Artificial sequence
  DNA replication origin
atttggtggaaaagacactggatttggcaggcacgctgtcgccgggacttgtgctcttggccatgtgacccggccgcgacagccgaaatcctgtcactcggcccggcgggaacggtgcatctcgtgggggaaggcggcgcggcgccgctctcgggaggctcccgggaccagagggcgcacgcggcgcgcgcgaggcctgcaggcggcggcgtccccgcggcctccagggggcgctggcccggcccggcggaggcccggggcgcccggcgggggcgggtgcgggggcgggggcgggggcggcaggcgcagcgcccaccctgcggcgggcagcgagcgcgcggcctggctcagcccgccggagggggccagacgaggcccgggcgcgcggcgcggcctcccccagcacagcgcacccgggagcggctgccggcggggcggcgcccagagccggcgctacagggggcctgagtgggggcggcccggcgagggtcgcgggtgagagggggattagggggttggctgcgctcagccctgcagtgcggaggtggcaacaggttcccatttgtcctgttgctggcgctgcgggcgctgtgggccccgagcactgagctctgactttggaaattgagcccctcatggcctcctcccaaatgctttctcccggtgcgaggacttggcagcagggctccgcagttaggtgcaggggagcccctcgccaagcgtcgggagacgtggacccttggatcctaggcttcccctcccttccccattgcggaggttgcctctccccgtcctcattccagcccagctcctctcacctccagggaaccctctccagagagcgccactgagcagctcaggagctccctctctagccgaactgagcccccacggcagggcgggccggggaagtggctgtccagctccctgctggtcacagccctgcgccacccccactctccacaacaagactggcacatggcagaacctccgtggtgccttcaacccctgcccactctgagctcc

SEQ ID NO: 42943 - DNA, 2289 bp, Artificial sequence
  DNA replication origin
atggcctcctcccaaatgctttctcccggtgcgaggacttggcagcagggctccgcagttaggtgcaggggagcccctcgccaagcgtcgggagacgtggacccttggatcctaggcttcccctcccttccccattgcggaggttgcctctccccgtcctcattccagcccagctcctctcacctccagggaaccctctccagagagcgccactgagcagctcaggagctccctctctagccgaactgagcccccacggcagggcgggccggggaagtggctgtccagctccctgctggtcacagccctgcgccacccccactctccacaacaagactggcacatggcagaacctccgtggtgccttcaacccctgcccactctgagctcccacccacagctgcagtgggcctggaggcagcccccaggctgggtgccggtgtccacctccaccactgtggagctaggctgtggacagaaaacagaagacaaagtccctgccccaggaacacactgagaaagggggaaagtgaccacactagggagcacagaggagggagactactggctccgagttgggaaggctgcctggaggagggggcctgaagaatgagcagaatctcagaatctgggcagggggcataggagggaggcctgggctggggcccttgcccactgggtgagagaaggaagggcacagtccagctgcccaaagcccttggatgcaggaattaggactcttgttagacgcagggacatggggggtgtggccggaaagcagcccagtgccagggtcctgggagtccccggctagcagcccactgcccgaaagggagggagagaggcaaactggaagccccttagaggtgacccacctagctttccgtcacctgccctcttacctaaccatgacctgagacattttctcctctaactccatggctcctgagaggagtctttagactcgtagtttgctttgcattttccacttgttagaaaaatgctttgtggtgcccatcctcgtgtgcataactttgctttcttttactttagttccttagattcccaaaagtggtcaaagggttgggattttttcctagctcttgatattgccagattaatttccaaaggggccgtaccaatatataaccctgcaacagttgaacagcacgctgatttcacagcaatcttgccagcactgcgtgttctcaaaaatgagaacatttctaatgcagtaggtgggaagtgttacctcgttggtcattgttacttgtttattggagtggctttccttccacgcctgaagttgaaccttcccccaaatatttgttaggccaccgcattccctccttcctgcagtatgcagtgttttcaggttctttgcccatttatctacaggggtcttaaccttttagttgggtatgagctttatcttatctggcgtacattttccttcaacactgttatttgcttttgttgagctttaagcagagaagggacttttagccagatcagcattgtggacacctccccctgaccctggtctcctgcctcagtgctcaccacacctgagaccttgtccagtgctcttgctgcctgtggatctgtcccgcctgttgtgcccatggaggaaaggatggaggccaccagccttggttgagtggatggcattctgacgttgggcagggctgggcagggcagggtggagggcaggtcgttgcaggcccggaggcagggagactgttgtgcaagacgtgacagtgacctggcctaaagctgatgaatttgagccctcggctagggcaagggacaggggagagaggcgtggatgtgagagatatttaggtagaaactagttctttccactttgattagccgaaggggggttaagggaaggaggcagaggggggagccacgggtgactcttaggatcagtaatgtgataagagcagagtgccccagtttagggctgggagctcagggttcctgggtgcttttggccagtcctgtgcgagtgaagcgggctggtattggtaggtatccaggagctacccctgcctgcctagccctgcagcagacctctgggccaaagctgcactaagtttctggtcctgcctcctcctcccctccgtgatttcggtggcatcccaagtttgcccaagctgctagctctgagcccattacagagatggggccactgagatccaggcaggggagaagatgctccagtatcaccctgtgagttgggctggaggcagcttctgcggcagaggggctgggctctggtcc

SEQ ID NO: 42944 - DNA, 961 bp, Artificial sequence
  DNA replication origin
ggcctcaactcgctttagaaaaaaagaagtggggctggcctaaggtcaaatgaatcccgaaccccctggaaggagggccccgcggcacctaccctggaggtagtaggccaggtagccttcctctcgcagcttctgcagcagggtgcccagcaccgactcggcctcccactcctcggcctcggcctcggcctccccgcgccggcgccggcccccgccctggtcgtacaggagcacgggggcaggcgggggcggctgcagcggcggcccaggcaggagcgcgcgcaccgacaggctgcccctccgcaggcggcgcagcaggagcgccggcagggccacgctcagcgccccaccgatgcgcgccgactcgtacagctcgcggctgcggcagtccaggagcaggagccgcggccgcgggggcgacagctcccgacgcagccacaggcacgagcggcccagaccctccatgggcgatcggctccctacacgctggaccacgggcgctgcgaagagagagaaggcgcggtgtgagctaccggagggccgagggggctcagacttgaagccggccccgcgtcctgaaggcgggagcccagggtcccccaccatgaggactcccaacaaggcgccccaagaaaccccccaggcagcagctcggcccggggaagggtcctcgagaagagggctgagcggctaaccgccccttcgaggctcatcttggggtaccctgaggtcgcagccgcctccctccataccccctttctgctcctgtctcggtcttctcgcgaacgctccccaagttcgagcttccgactctggctgggggtgtgcgtgcgaggagtgccgttcgaggcctagatctcccccagggccaggtgggccaggggaacagaggaggcgccgaggtgctgggcctcagcgagtcctctcagaggtggtctggcccccggtcccccatctcccc

SEQ ID NO: 42945 - DNA, 1574 bp, Artificial sequence
  DNA replication origin
cttctcgaggacccttccccgggccgagctgctgcctggggggtttcttggggcgccttgttgggagtcctcatggtgggggaccctgggctcccgccttcaggacgcggggccggcttcaagtctgagccccctcggccctccggtagctcacaccgcgccttctctctcttcgcagcgcccgtggtccagcgtgtagggagccgatcgcccatggagggtctgggccgctcgtgcctgtggctgcgtcgggagctgtcgcccccgcggccgcggctcctgctcctggactgccgcagccgcgagctgtacgagtcggcgcgcatcggtggggcgctgagcgtggccctgccggcgctcctgctgcgccgcctgcggaggggcagcctgtcggtgcgcgcgctcctgcctgggccgccgctgcagccgcccccgcctgcccccgtgctcctgtacgaccagggcgggggccggcgccggcgcggggaggccgaggccgaggccgaggagtgggaggccgagtcggtgctgggcaccctgctgcagaagctgcgagaggaaggctacctggcctactacctccagggtaggtgccgcggggccctccttccagggggttcgggattcatttgaccttaggccagccccacttctttttttctaaagcgagttgaggcccccctcccctgatgacctgccaggctgctttgagaggagggaagcctgagtgtgaccgtggggaagttcttcaccctcggcagcccagtctctgagcctggaaaatggggagaattagcctgacctgagctagttctcaggatgctcaagaacgaattacaaagtgcgggctccccagggtctcggcaagggtatccccacctccccaacctgctcaggaatgagcaagggaggcaggggtcagacagcactggtgcaatcacggctcactgaagcctcctgggctcaagcgatcctcctgccttagcctcccgaacagcatataaagtgtcaggtgtccagcccggggaaatagtatctgtaaatagagatgctggcttcttgagccatattctcccccaagttcccccacatcttggggtcccacttcatccctgagagtcaggagatgcccaggcagagagctgacatctgagttcctccttttctttagctgatggccgcagtcctccctaaggctggcagtgcatctcggctctgttgagccctcacacctgcctcagcttgaccctaggggtgtaagatcctttccggtggctcagcgtgagcccagcttcttgcagcccgagctgactgagggtggctagggccccacgtgggtaccaggacacaccaagctgctgggttttgtgttccctttgggaacatttgcaaaccctccaagttgtccagggtcatctccccagccccagacagaggcacttggctgcccagaaggccaggtcagcaggccccatgccctctccccaacaggaggcttcagcagattccaggccgagtgccctcacctgtgtgagaccagccttgctggccgtgccggctccagcatggcgccg

SEQ ID NO: 42946 - DNA, 1153 bp, Artificial sequence
  DNA replication origin
tgtgtgactacgcgagtgggtgtgagatgatgtgtgtgtgtgtgaatatgtaggggtgtgtgaatgtgagtgagtctgtgagatggcatgtgtgagtggtggtggggggtggcacagggccaggtagggcctccccatctccttcacagggggccctccccgctccactctctctccctcctgcctctcctctcttcccacttccttcccacctcccaccgccccgtctgcggcaggggtgccttctccgaggtggtgctggcccaggagcggggctccgcacacctcgtggccctcaagtgcatccccaagaaggccctccggggcaaggaggccctggtggagaacgagatcgcagtgctccgtaggtgcgcacctcgcggggccctgggacggggcataggtcgatgggggggtgcaagcagtccttggctctagtccaggcctggccaccaacctttgggaggcctggggcagtgctctctctgggcctgcacatccctgtggcaaagggagtgagttgatattgatctgtgcttttcaaatgggctttagaaggaaggccggggctcaggctggagctctgccttcctggaccgggcaggggtggcatgtggtagggaatggggagcagaggtgggaggaagagaagagggaggaggctttccccagggcctcaggacagagcaccccttgactctgttggcccacaggcgcttccttgccattgcaggatcagtcaccccaacatcgtcgctctggaggatgtccacgagagcccttcccacctctacctggccatggaactgtgaggagggcctgggcaggctgtgggagccggggagggactgagcagtgagtggggctgaaggccaggctgagtgcctgggtcagccaaacccctggcacccccagggtgacgggtggcgagctgtttgaccgcatcatggagcgcggctcctacacagagaaggatgccagccatctggtgggtcaggtccttggcgccgtctcctacctgcacagcctggggatcgtgcaccgggacctcaaggtgcctggctggggcctctgcaccccaccctcccacctgcccacctggccctgcctttgttttcccgggagcacggctggggcctttcttgatctcctg

SEQ ID NO: 42947 - DNA, 1302 bp, Artificial sequence
  DNA replication origin
gcggcgcgagcgagcagtgggctgggcggtggcggccggcacccgagccggatcccggcgattgccttacaaggtgccctgcggcgccgcggccgcgctgggccactgcgtgcttgggcggctggcgggggcgtgcgcggagggggcggggccggcggggcgcgggcggggggcttggcgctgcggccactgcgcggcacgacgctgcggcacccgctccaggtctgcacctgctccggggcgcggggacgcgcggggcgggggcgcaccggatccggcccgcggccgccgcagccttgcgcgtccgcagcacacctgtcacgcctggcgcgccccctgcccgcacgcgctcggtccacgcagctcgggacgcgggcggcccaggctgccaggtccccctgctccgcggcgccgagggctgggctgcgtctgcggccgcgtgggtggccgcggtcttggcaggtggctgcgcgcgggggtcgcaggtgcatcccgggcggcttggtggcttgggcagcgggtgcctgtgggcgctgtgccatgggtggcgggtctaggcgggggtgggggcttgggcgctgtagatgtgtggatgggggagggacggcgtgggtgagcatggagccttctggaaagcggccggatgtgtggaggcagagaggcagcatccaggcgctggtcgccttcggggtgcgggggagggtgcgtgggatagcagctgtaggcctgggatgtggaggcgtgtatgcggtggcctcgctgggaggcgtccgtctgggggtgtggacctggacgggggaggggagggtcgagcgcgcagcggcaatggctgaggcctgcctggcagggggtggaggaggaagctgcccttgcccccggcggggcggggagagacccccatcacctctcccctgcccctgcagacatgctgctgctgaagaaacacacggaggacatcagcagcgtctacgagatccgcgagaggctcggctcgtgagtgtgcgcgcgcgtgtgtgatcgtgtgtgtgtgtgtgtgtgtgtgtgtgtacctgtgtgagatggcatgtgtgtgtgactacgcgagtgggtgtgagatgatgtgtgtgtgtgtgaatatgtaggggtgtgtgaatgtgagtgagtctgtgagatggcatgtgtgagtggtggtggggggtggcacagggccaggtagggcctccccatctccttcacagggggccctccccgctccactctctctccctcctgcctctcctctcttcccacttccttcccacctcccaccgccccgtctgcggc

SEQ ID NO: 42948 - DNA, 1657 bp, Artificial sequence
  DNA replication origin
actaaaaatacaaaaattagcttggtgtggtggcatgcacctgtagtcccagctactcgaggctgaggcgggagaattgcttgaacccaggaggcagaggctgcagtgagctgagatggcactactgcactccagcctgggcgacagtgagaccctgtctcaaacaacaacaacaataacaaaccaaaaaaaaccccatgatacaatgattcaaacaaaaactgtgccatcagcttttacatgaggccagggccacctgagtcacctcgtggaccaatacctgcccgctggctcgtctttcccaggcccactttggaggtgggtgctttccttctggcctccagtttccatctgctgcccctcagataggtctctttgtgccatctctttccacgcgggcagttttttattacttttctggggcacagaaatatgtgtatttctatttctttttataacccaggaccatgttgtagaactctgcttgggcaaagcaccattggcgtattagacattctggggaactatctgtaggtatctgtaaacaaattgcacttcctgctgtcatgagaaggggctcaccatcagttccattcctatttttttctgttttagatgtcggtcccaggaaaccattttcacatagaggagcaggtgggactggagtttctgagtgctggggtccctggagccttctgcagtgtcctgggaggggtgactgggaaaggccagggggcaagagctgctaggggccttctcagatttcccagtttttacacagagtatatatgggagttgaggtctggaaaaatgattttttaaaaactcttcctgccccgtggactctcttgaagacgtcgtgtcatgccagggcccacggtcacttgacggaacccttgtgatgctggccacaacctcatgggactggatggcgagcagcgaggggggtccagtaactgttggatgcaggattgaattcggtcacccgcacttatttcctgggctcgtcttggttgggttcgcggagatacactctctgggagcggacgctttggtgaggaagaccaggcgaagaaggtgatttttgcggttggacgttctaaagacagggcagggttatgcggagagaattggcaggggcagggcgggggaggccggtttgaggaggggacatttgagccgagatctgatggaacgaggagccaagccaggcagatatctgatcgaagaacattccaggcaggggagcaaaggctagggccgtcaggaggccagtgtggccggggaagaggtggaggaggaggggccagggcagtcgttaggccgccccctaaggactcatgctttgacttggattgacatagagagctgcaggagggtgacatgatctcaataaaaggaatgctctggctgctgggtagagaagaaagcgagggtgagggattaatggtggagccagagggagcccagtgagtgccgggagcccagggtggcagagctgtggtgcagggttgcagggtcctggagctaggcatggaggctgctttcgggcaagtggccgggtcagcctgtcctcggagaggcggtgaaggcagagactggaaggcagagagccttgccgacctgtggccgaagagctctccgggagacagccacc

SEQ ID NO: 42949 - DNA, 2169 bp, Artificial sequence
  DNA replication origin
ctctccttcccggcggcggcggctgcagccgctctcggggccgcggcgggctcagcgactcgccacctcgctccgactatccctctcttccccgtccccggccggccgccgcttaaaaaccgactccggggtgatgtcactatcgccccacccccacggccggccggcccccctccccctccccctcccgcatccctccctcccgccctcctcgtcacactccgcccacctcctccctgccctcctcccggggaggagacgccgctccagcgggaggcaggatggttgctacctggggcggccgccagctcctcccgcagggctccgggccgcccctcgccccagggtcgccggctcctagtgcagcccaggcttcccggccggcccctcccagccctgggaagacgtcccccgggccccctcagccctccgcctccccttctctccctttctccccgctcctggcaggctgcagccgtctcctcccggtgctccctccttccttgagctctctccaccgctgcccactgggggctacagcttcccggctaccctggaagctggaggccgggaccagctcttcaggtgacaggcctctgtgtctccacagtgggcagaggggagcctgcctggctgatgagcaagcctcgactttgtcatcaaggcagagaaggggcccgggtaaatgaccccggcggcccccacccctgcctggcgtgagagtgggtaggggcttcggacttgaggggactggagcgggaacaaggcaaggctgccccctggtgcctggcaggtgcacagacccttccccaaaggcctcaggcctgaggtcctggctgcccgccccccacccaccccgtgttcctctccccaggaccccccaggcctccctagcaagagccagcttgttgggctgcctctccgccgccagctgagcagcttgtttagaattttctagggctaagagtagcctgggggtggggtggggaaggaagtggtcattgtcctggcctgggaggtaaagtgtgcccccctcagcttcaagctccctgatctgatcgtggacactgcagtccccagatggctcatcccgttaagctaagcccgcggccatccgtccagctttaggaagaaaagcagttccggcccaagccagattgagcttgctgggtgagggagggacagtgtccccacccaggcttggaggaggagcctcaaggggtgtgtgtggttgggggagacaggcggtgtcacctgtgcttagaccaggggtggtgggtgggtacccctgaggtggcaaggtcacactgctcatcagaagtttctcactagggtcttctctggcccagcctttgactgaagctggtctggagacaggggcattagagaagtgactcatagatggcctaaagaagcggggccactcaaggacccaggacagagggaagagggccaacccagctggaccacaggcaaaccccattgcctttgagagaaagaagaggacccggtgaagtaggctcggagggcctcagcccagcaggagtgcggggtgggcgcgtgatgtcatcgaagggaggacggtgacctgggggagggccgctttgagggagagtgcaggccacggccagacagctctgggagccgcgggcaggggagactttcagatgttgcttgtcaaaggggtgggggtggaagggagagaaagcagaggctcgagaaggatgtaggagagctgatggcactttggggaagtgaccactgctgcggttactcctccggtgggttccgaggccagggacaggatcatgagggagtcgccacccctgactgctgctgcctttgtgagatcagaggaggccgaggcagagggcgaggtggccaggctggagggtactggagacagaagtgaagggtggggggctgtccagaatggctgccactgctccatggaccctcggagtgggagcccccacatctgaggggaggtccagtgggcccccatacctgactcccacgacctcctggaactgggctcttctccaggcagccaccccttcccacacccaccttcttccccgccctttgccagcccagcctggggtgcacccactaccagcccctgggccaggccctgcctcccgcccccagctggtctggaccccatag

SEQ ID NO: 42950 - DNA, 1013 bp, Artificial sequence
  DNA replication origin
cagacattgatgctgccggccttcatgaactggcccagcgagatctctaagaagaaaatggggattcctccaaccagggcgatcaggacgtagggaataaggaacacacctgggggtggaggcacagcgtggactcagggtggcccccagccaggctgcccaggcccagcgggccagcccagactccaaaggccccatcacaacttccgactgggtgagtcagtgtaggggtggccactgactcaggccccaggtggagtcttgagggggtgggttgagtgtgttgaagaggggctacagtagcccctgagccattggagccctattccctgggtggcagaggggccctaggcccccagggcttccacccccacggtcacttggggcgatggccatggaggacacacacgctcagacacgcgggctgtccctagtgctgcaattccctgtttcaggcagcacagtgagggcacgtgcatgtgtgcatgtgtgccaaggctgggtgatcaggcctggggggctcatccaaaggcagggagcgcgactgtcctgcccttggacgcttgcctgcaagtgtgaggtctaaggcagagggtgggtgggtcacagtcccctgctggtgggatggcgatgtgcaaggacagagggatacaggtgcggaagaggggccaggccggccttagcaaggccagggagtcaggctctgcaggagataggcagggcgtgacacaggcctatctcctgaggccagcaggctggggtgggggtggcagaagggcagggagagctgggtgccactacccccttctcctctctgggcctcctacccttgccctggctgggctcgctccactactcagaggctgagcttggctgcaacttgcctgactccaggtcccagcatccttctcctgaccttgggcaaaggcctttgctctggacctctgtttcccacccatcaccgggtcacttcggcttccagcaaccccagtgctgttttgtagtcacaggac

SEQ ID NO: 42951 - DNA, 1144 bp, Artificial sequence
  DNA replication origin
tgggccagttcatgaaggccggcagcatcaatgtctggaacatctgtcccctgttcaaaggtgagcagcccttggccagcctcagggactgcccccttctcccagctggctcccacttgagaaatcttttcctgtcgtgagcaccaggcctggggccacgtgatggcgtcccagtctcgaggggggagcctggaggagatgttcaggccgcacagcgaacttggggaagcggggactagagggggcataggcagctccacaaggcaaggacaggccaggcatagccgggctggggacgggacctgcccagcagcacccttggctctctaggtaggtcctactgttactatccccaaggacgctggggcacagacaggtggagcgacgtactgaggttgcccactgcaggggcgactgtctccaacactacctcaggcgactagaaaccccccccccccaccaccaccatcaacaccagctgctgaggactggaggctactgggtggccaggcagaggcttggacctcctggaaccgccatggtggcagtgggacccacagaaggggccaggtgtatgaggctggagactccacagcacttggtcagatggggacaggaggagaggggctcgctctgccttgggtctagggggcggctggaggagaggagacaggctggggagtcagcgcagtgttggggctcacacaagggggagcccaggggagtcaggagcaccacaaacaaggctccaggaggacagatggtgggagcacggccagcctgggtggggacataaaggggtggcagggggaggtggccagggaagaatctacatggcaaggacttcccggccccaggcctgggctacgcctccatggtgatcgtcttctactgcaacacctactacatcatggtgctggcctggggcttctattacctggtcaagtcctttaccaccacgctgccctgggccacatgtggccacacctggaacactcccgactgcgtggagatcttccgccatgaagactgtgccaatgccagcctggccaacctcacctgtgaccagcttgctgaccgccggtcccctgtcatcgagttctgggagtgagtccggcacctctgggccaagcccatcccatcc

SEQ ID NO: 42952 - DNA, 746 bp, Artificial sequence
  DNA replication origin
gaggagttaaggacaacagatttggcctgagcaagaggaaagatggagctgccaggtcctgcaatggggaggcaaggagagaatggtctggagtcagccttgggtgtgtcatgcaggaagtgtcatccaagtggagatgtctagttggcaggtggacacaggagttccagaaagtactggagatggaactgtgcaagttcttaccacatagagatgacactgaaagccctgagcctgagtgagctcacagggacgccgcaagccccggaacacaatgagaggggcagagcgaagacgtggcagtgataggggaggacgcctgagagttcctggtggggtcctgcaacctgagccagtgaggacccctcacaggtcagggaggagcagtggctggctccatctgtccagtgctgctgctggtgaaggacagtgacctgcaaatgctcactgagtctggcaagggtcacgggggcctggcgagggtggcttgcatgagcgggtgcgtgtgaaaggctgggtggtgtgcgactgagaaaaggagtggcggcagcgcagtgtcatctgcagacgaagggagagacaacaacgtagttcacccagacaaggaaatatgagccagcctggaaagggaaggcattccaacacacgacacaacatggctgaccctggagggcatttctgtgaaatgagccatcataaagggatacttgctatagggttctgctcctgtgagagagacagggcct

SEQ ID NO: 42953 - DNA, 661 bp, Artificial sequence
  DNA replication origin
cgggtgcctggggggctgctgcaggagcccccagaaggcgtccctctgatggggtgggagatccaaaagggtttctggggggaggtgaggattgagctgggtcgagaggacattccggcctggagaactgccacacagagccaggcgtgttccaggaatggtgaggggttaggtgttactagagcagggggccacgtggttagtgaaggaggagagctcactgagggcatgcgtgctggcagcaggtggcttaagcagagggctgacatggtcggatttgccttgctctgggaggtggatgggaaagccgtatggcagcagatagggaggaggcgccagcagtggggatgatggtgggcatgtttgcagttgacatggaaagtgctgggttgtggcttgggctgggggccaagagggctgagtccaaggcggtttgcctgcccaccactacagcaggggctacacgaggtggtcaggtcaggcaggacaagggaaggcccgttttggacaagctgagtctagaatgtctctggggacatccaggagccaatgtttagcaggaggttaggtatgagtctgggccacagagaaaaccctttcggggataagagtggctgggaggaaggtatagggtgtcagctgaagagtgcagaccccagag

SEQ ID NO: 42954 - DNA, 1571 bp, Artificial sequence
  DNA replication origin
ggctccgggaccgcggaggctccccggcccatcgacgagggagagaggcgagcggcgcggggaggcccgggggccggggaatctcggggcccgcagcctacctgcgtgtgagaggcaggggcgaggggaaaccgggcggcgcctctagaagctggtctcgggggcggggcggggggcggtgaagccccacctggaggagcggccgggatgggcctccgggacggtgtgccaggccggggccaagtcggaggcccctcgctctgggtgggcgctggggcccgcgagggctactgtaaggacccctggcttctgaggatactgcgtctagaactttctccgtatggggccttgaggtgcttggtcgagacctgcctttgcgcttggtcccgaatcctgccctctaggagtcgctcttgcgggcctccagcccaccggaggcgaagcggccccgggcggaaggccgctggatcctcgagggaggtgccggtttctctccgcgggcgccgtggggacggtgggaggcgggggcgtcggcagcgcttggactaggtgcggccttgggcctgcctggtagcggggatttgggcccgcagagcgcccgcctctgcggctgagttctgcctggcggggaagggagcgcccgatgggtgccgaggcgtcctcctcttggtgccctggcactgctcttcccgaagaacgcctttcagttaaacgggcgtcggaaatctcgggcttcctggggcagggatcgtcgggagaggccgctctggacgtgttgacacacgtgctggagggggcaggtaattgaccagcgaacggaagtttgtggggcctgtgaacgctgctggccaagaggccctgccgagtggagccctgcttccgccagcgcatcagagactttgaagcaaagtgcagggggtcagggtggagagtggcggccccagcctcgcagggtaactgaactggatgttcttggctgcccagcgcttacaagtcccgtaccttttgtgccctgccaggaaacaagctcacatcttcctgtgggaaaccttctagcaacaggatgagtctgcagtggactgcagttgccaccttcctctatgcggaggtctttgttgtgttgcttctctgcattcccttcatttctcctaaaaggtatggcctatggagcaagcaggcgagttaggcaggagggtgcctgtgccctagccctgggactggtgtgtgcagctggtggaccctggaattgggacccgatggaacaggtagaacctgtctggggtgggggtggcaggggttgtgtttgttattgccaacccttcccagggttctgcttcgtcatgacttgctcagttccttttcctgtgtcccctgccttctggtcttcagaatgcccccgagaggcaggaagatctatgttacagttctggaaatgatgccctcccacccactcttggtccacggggtgctgggatggtagcgtgggattcggaagacttgcaccactgggtcacgttgttgctgatttggtgactcttgtcctcctaactagtctcactggtattgcgcag

SEQ ID NO: 42955 - DNA, 963 bp, Artificial sequence
  DNA replication origin
ctcaggggccagggcactgacaggacaggagagccaagttcctccacttgggctgcccgaagaggccgcgaccctggagggccctgagcccaccgcaccaggggccccagcaccaccccgggggcctaaagcgacagtctcaggggccatcgcaaggtttccagttgcctagacaacaggcccagggtcagagcaacaatccttccagccacctgcctcaactgctgccccaggcaccagccccagtccctacgcggcagccagcccaggtgacatgccggtgctctccaggccccggccctggcgggggaacacgctgaagcgcacggccgtgctcctggccctcgcggcctatggagcccacaaagtctaccccttggtgcgccagtgcctggccccggccaggggtcttcaggcgcccgccggggagcccacgcaggaggcctccggggtcgcggcggccaaagctggcatgaaccgggtattcctgcagcggctcctgtggctcctgcggctgctgttcccccgggtcctgtgccgggagacggggctgctggccctgcactcggccgccttggtgagccgcaccttcctgtcggtgtatgtggcccgcctggacggaaggctggcccgctgcatcgtccgcaaggacccgcgggcttttggctggcagctgctgcagtggctcctcatcgccctccctgctaccttcgtcaacagtgccatccgttacctggagggccaactggccctgtcgttccgcagccgtctggtggcccacgcctaccgcctctacttctcccagcagacctactaccgggtcagcaacatggacgggcggcttcgcaaccctgaccagtctctgacggaggacgtggtggcctttgcggcctctgtggcccacctctactccaacctgaccaagccactcctggacgtggctgtgacttcctacaccctgct

SEQ ID NO: 42956 - DNA, 1793 bp, Artificial sequence
  DNA replication origin
actcggccgccttggtgagccgcaccttcctgtcggtgtatgtggcccgcctggacggaaggctggcccgctgcatcgtccgcaaggacccgcgggcttttggctggcagctgctgcagtggctcctcatcgccctccctgctaccttcgtcaacagtgccatccgttacctggagggccaactggccctgtcgttccgcagccgtctggtggcccacgcctaccgcctctacttctcccagcagacctactaccgggtcagcaacatggacgggcggcttcgcaaccctgaccagtctctgacggaggacgtggtggcctttgcggcctctgtggcccacctctactccaacctgaccaagccactcctggacgtggctgtgacttcctacaccctgcttcgggcggcccgctcccgtggagccggcacagcctggccctcggccatcgccggcctcgtggtgttcctcacggccaacgtgctgcgggccttctcgcccaagttcggggagctggtggcagaggaggcgcggcggaagggggagctgcgctacatgcactcgcgtgtggtggccaactcggaggagatcgccttctatgggggccatgaggtggggcaggttggggtgccgggcacggagggaagcgtgtggcagggaggcccgggggcaggcagccgtgagcggtggggacagtctggggcgggccggggctgatgccaaaggtgtgggcaggccatgggagagccgggctggggtgggcagggcctttgggcagccgtggactcaggcgcggcagtggagaggcaggaaggctgggtggggactgtcctgtgctggttgcctgcacgctcgaggccacttctgcttcctctcctcctcaaggaggttgtcctggccttagagctgcgatcctagcggtttgagcctcgagagctcctgcccgccccactcctgcagccagccaggaggagacgcctgccattcatgagcggggaccgagggacgcagcctgctgcctagcccctcctgggcccttgggccctttgaaggccggcgtccagcagagctggctggccaggcaggccggcattatgggcatgactcagcccaagcggaggttaatgagcagcgcccagcacagcagtgggacttggggtcaaggccacccccgcctgagcccacaggcctgcctggctaccaactggctcagctgccttcccgggcccccagaccagagatgccgggcccaggccgccactgcggcgggacacacttcctgctcctggcgtggctgtccttccaaccctgtctgtctcctggctccctggtgggccggggccggcgggccagacaggcgctgggaaaggttactccaggtcaatgctccctttatctcgcctcagcccctccccttcctcgtgcctggggttgcagctgccttgggccctgctctctgcgactcagtttcggttccccagtgcttcttgggaggaggggcacaatggcatccatcccccgaaggcctgtgtgtgctccctgggtcaggtggcctcttgccctgggaccttgtctcactggctgtgcaccagcagagaagcaggcttgtccccgaattccacggagaggggcatcccgggtgtgggccagactgcagattcagagaaaaggcccctggacttcagccaccaccctggcttccctctcctcttctcccgcatgctgggctgcagggccttggcaagcagctgcagccttgggcgaggcgcttggcacattccccgcagctacatt

SEQ ID NO: 42957 - DNA, 1369 bp, Artificial sequence
  DNA replication origin
ccaccccagccccgctgtgctgtctctgcaggccaggtggtggatgtggaacaggggatcatctgcgagaacatccccatcgtcacgccctcaggagaggtggtggtggccagcctcaacatcagggtaggtccagcggggagggcgccagccacgcacatatgcaagcctcagcccttggcttcccgcctgtctgtgctggcaacagccattgtccctagatgtacgtggcaggtgggccaaggtcaaggtgagagaccaacgtgtctctgactgttcatcctggggcaacagaggcagggctcataaaagagactagtgataccaggattgaccaaggttcaccccggcgttcctggccctatcatctgatgccaactccccacactcctaagaaagccaagacccgggtgggggggctctggttcaaaccttgccgctcgacctccctcggaaggccacagcaaggaatccacagatcacctgtgtccccagccaggggtttggacagggctggggagtaatggagtgagggggagactggggtggagggacaggtagagaagtgacaaggaatcactcattcattcactcatttaaccaatgtgccctgaactctgagccgggcaccagaaacccgaggtaaatcaggagacctgcactcagggagtcttcactgtggaggggcactaaagtgttacaaagggtctccaggtagacagctgttcaagggacagtgggggtcacaagaagagtggtcagagtccctgggggtggtgggggtgggatgaagccttgcccaggagttgctgtgagcgagtgggcaggcagctgagggtagaggagtgaggggccgtgggcctgaggggcaggtcacgcaggaggaagcagagaggaggggcatgccagggaggagggggccggcacaggtggttacccctcaccgctcgcagcggcccctcctaggatgtcgggggagctgatcaccagtgagtccaaggaaggtggtttccaggctggccccgggcagcacaagcaggcaggggcagcgggcaagctcatggggcccctgcgcgcagggccacatatgctcagggagccgggtatgcgagatggggcaaggcccaggccccacccttcaggaggggacagtcaggtggcttcattagcatcctgtggctgcggtcacaaagcgttacaaactttgagtggctttcccagcagagatggcctctctcccggctcggggaatagcagtccgagaggaaggcgcaggcagggcgggcttctgccaaggaccgagaaggtgcctccgctcggggcctctgtcccagcttctgctctgctgcccatctgcgggcttccctgg

SEQ ID NO: 42958 - DNA, 923 bp, Artificial sequence
  DNA replication origin
cgccaccgtcacaggaatcctaagagcattggcgtgaggctcggcggagggcatgctggaccatgtcttctggtgactttccccctcggaggggcttgggggtcaggcccactcctttcccaaactcactctttcccccacaggcaacccactccctctcctccatctctcctcgagacccacagcagacaccaccaggctctgaggcagggaggaaggactgcatttgccagtggaggcttttactggggggactgggggtggtgcccggcccgagggctgagggcccgggaaaggcacacggtggcggtggggtctctctcgggcaggcgctggctccgcagacagctccccctggtgacccctctttggcactgagctgggaacatggtgtccgcactcctggctggcaagcagaggcccgtgtgccccggtggcggctggcagtgtaggctggcggggtgacggccgcaggggctgggtttggcaccggtgggagccggggccccacgggactcagaggctgggccgcccccgctgctggcacggtagtcacattggccacggagatggctacgaatagggaatccaataaattaggctgtagaaagaggtggtgaggggccgagggggcggggcctgcattctcgcttggcaggcagtgctgtgcgtccctctcccctctcccgtgggatctttggggctcttgtgggggagaggatgcaggtgaggcgctctgtgtgactgtgggtcccactgggcggcttttatggcatcccacggaacgggagccttggctgaccaccctcaggggatggaccatggggtctttgagagactgacgaggagggaatcatggggactcgagtctctggagggaggccacctgcagtgccaggggctgtggcctgacgggctcctgg

SEQ ID NO: 42959 - DNA, 1233 bp, Artificial sequence
  DNA replication origin
agtctctcaaagaccccatggtccatcccctgagggtggtcagccaaggctcccgttccgtgggatgccataaaagccgcccagtgggacccacagtcacacagagcgcctcacctgcatcctctcccccacaagagccccaaagatcccacgggagaggggagagggacgcacagcactgcctgccaagcgagaatgcaggccccgccccctcggcccctcaccacctctttctacagcctaatttattggattccctattcgtagccatctccgtggccaatgtgactaccgtgccagcagcgggggcggcccagcctctgagtcccgtggggccccggctcccaccggtgccaaacccagcccctgcggccgtcaccccgccagcctacactgccagccgccaccggggcacacgggcctctgcttgccagccaggagtgcggacaccatgttcccagctcagtgccaaagaggggtcaccagggggagctgtctgcggagccagcgcctgcccgagagagaccccaccgccaccgtgtgcctttcccgggccctcagccctcgggccgggcaccacccccagtccccccagtaaaagcctccactggcaaatgcagtccttcctccctgcctcagagcctggtggtgtctgctgtgggtctcgaggagagatggaggagagggagtgggttgcctgtgggggaaagagtgagtttgggaaaggagtgggcctgacccccaagcccctccgagggggaaagtcaccagaagacatggtccagcatgccctccgccgagcctcacgccaatgctcttaggattcctgtgacggtggcggggcggaacctgcaacaacattgcacagaaatactggctgagcccaaataggactaggggaggggatcatgctggtccctgtgggaggagcacgaaggcaagagaagggatgtctaagctgccacacagggtgctgctggcccttctagggagaggcggccacttgtgcaggggcctggggggaactgggagcacagcgcagggtgttcgtgctgcatgcaggggaagggagggcaggggaagggagggctgcggccggcgggccttggaggccacactacagagacaggacttagcccagaggccaccgaggagctttcagcaacagggaagcagtgtcgagtactgcaggccacgtggctgcatgtgagggtggctggtgggaatagggtg

SEQ ID NO: 42960 - DNA, 1629 bp, Artificial sequence
  DNA replication origin
gaggggtgcatgcacgcacgcacaagcacacaaggacagaattctttcatctcctactttatatgcatgtagattgttgaaggggggcaggtcctggaaagccgcaagagcgctaacagagggactgtgagtcacagagggggcagggatggagagagggcaggggagggagggaggccgcgggagctggaaggctggcggaagctgtgtcacagcgcgcccctgcgcccaccacccagacaagagagatctaagtcaggtgagaggagtgaggccaccgtgtgccccaagggaccagacagggagagaaaacctgccttgggcagccagggccggctgcaaggaggaaccctccgcagctgggggaaagagccaggcagccgcgggctgagcaaggagcaagtcagcgaagaggcaggggtgagctccatgctggcgcccagctccagggcgaggaagcactggggcaaggcagcgggggtgctgggagaagccaggggtgtcaagagacaacacaggcttcaggggtgcggggaggcctgctcctgccccatgggccccagcagtttgggtctctcagggcctggcacagggggcctcagtgtaggagtgtcccaggagaagagcagaccaggagagctggctgggggaggggtcagggaaggggcagggaggggtgccagactggagatggttcctgggtgtgcctggtgggaccccggggtgagcccccgagggtgagaggtgggagcagccccttctctggcccctcctgccctccacagagagatgctgccctgggtgtgtggtcacatgccgaccaggagtggggccgctgcgactcagggcagagcagcgcctggaggaaggcccaggagccgcttatctcaggaacacaggcaggaagagcacggacacttcctgcggaccccgggctatctggggcagtgtctgccatgagggaggctgcagcctgtatgtcctgggcctggccacagccatcctgccctaccctgcccctcccaggaacatttctggggacaccgggcctgggcacttaccatgaagtggtgcagcagaggggtctcctgggcggcgtggcacatacgctcagttcagctgccccagggcagtggcgatgggcatgagatggctgcgggggggcattgtcctgagtgggagggagacagtcgaggctcagccccattcgagctggcctggggaaggaggggcggcggtgggggtggcgcccagggcctagcgaccgggctccctcacagctggcagctttgtcaatagtggccaggccaaggcagccctgcctccaccacaacaatgttccctctgtccagaggccaggccagggccccactcgctagtgctgtcacccccactgggctgttctggacagggggctccttgccacttcccaccctcagggagccacccccgggatccggggacaaagggccggggtttcctccagccagccctccccctctggccctgcaacccctgtgtcactaagcatgcccctccctggctccccgggtccctgtgaagggcacggggtggaccttggagcccctgcaaatgccggctggtagccttggggcctgggtgaagtgc

SEQ ID NO: 42961 - DNA, 1147 bp, Artificial sequence
  DNA replication origin
ggagcggtactcagcctgggcccgggccccgcggcggcggaacacgaagtaggcggagcgggcgtcggcaaaggccccgacgtagctgttgttgtagtcggagaagtcgcccaccaccaggcggcccaggccctcgctggagaagggctgagacccggccagctggcggatggccaggggtggcacccctgccgacagcttgcccgccaggcctctggccacaagcaggaggtcccggccgggcaagggcaccaccagccccaccgttgccactcccggggtattggcagccacaaactgcccgtcaccagggtcctcagcctggtacagcacctcggccacatccccaaggcgccgtgtctcacacacgccctgccgcacctgcccgcaggccaccagctcctgggcgcggctgctcaccagcagcagctggttggcattgtcagtgagctgggcctgtgggcactcggctgggtcacggaagggcacgcagtcagggctgtcgattacagggccagtgacagccacggcctcgagctgcagctcggggctgagctggaagaggcggttcactgcgccgacatagagtgtgcctcggccaggtgccagtgccaagtggttgagagtggtattaggtgcggagaagcgatgggcccctgtcaagggcagtggcggtggggacagcagcagcaggaggaggcagaggccgaagggaggccagcgagccatcacgggggcctgtgagagggcacaggtcagggcagtgggagcgcaaggcagatagaggaccagaggaaggtggaaggtggggtggacagaggccagggtgctcagggccagggagggagggaggcagagagatggagaatgagagagagtgagcggagacaaggagacagagggggcacagagagagggggacataaggagggacaaagacagtgtccaagagctggagcaagaggcagggaggggtgcatgcacgcacgcacaagcacacaaggacagaattctttcatctcctactttatatgcatgtagattgttgaaggggggcaggtcctggaaagccgcaagagcgctaacagagggactgtgagtcacagagggggcagggatggagagagggcaggggagggagggaggc

SEQ ID NO: 42962 - DNA, 1279 bp, Artificial sequence
  DNA replication origin
agcaggcagggcctcatggccaaggcgtgggctccagccctgagaggcaggtgcggctgggctgagggacgcacagtgactcagggctgccttaaaggattccaggggctgccgtgtggagcaccggctggaggacagctgtgtggggttctggaccctggctggggctgctgggatgaggagtccacaggccgggtggtgtcggaaaaggggggtgccaaccagattgacggctcagtgagatggggcaggatgggtgacctccgtggtggccctgagtctctccaacaggcagggttggcctcccggcacgcctagggctacttccaggggcagcctcgtggcacacaccacccgttggccctagcctaggcacaggccccgtgctcacctgccctggaggacacaccagccacacagcgggtcctgggcctggaggcagctggcacagtcagggaactgggggcaggctgccacaggtatccggtccacctggaggggcagcagagcagagaggcaatgggcacgagacttgggccgcgtgtgctggccccttcagccccaggatggccctcacctggtgggcagtcaggacatagaggtgactgccactgctgtccagcagcaggtctgggctgatggctgagcctggaggccccacttgctgggagtggtaaacctggccctgggagccgtggagaaagacctgagtggggggacaaggacgaggctgggccagatggccaaaggttgcctgttccagggacacgccctcctcctagtgggggctcctttttagagccagttccccttcctgccgggccatcgagggaggacacatcacttcccccactcagcaccctcaggcctaggacactctccagggaaccatgacaccggggcagcagcggcaccctgggtgaggccccgtgtaccagggacagttctgccaggtgggagggcagctatggggagacaggaaggtcaccaggaggcaccacaccctgcccacctcacccagccaccccagccaccttcaccgtgagccaccaccagctggtgaaggccgggctgcagggggcagtgctcagccagcagtcactgtgtggcaaagtcccctgacccaaccgtgggatgcgggctaagaggtggaagttgctgggggctttcctgagcctccgtggccaggggcacacccagccggacagcaaggccgggccctcaccttgtacagctggccctgggtgtcccccaggaaggctatcatgtgcccatctgc

SEQ ID NO: 42963 - DNA, 869 bp, Artificial sequence
  DNA replication origin
tccaggatgggcagccgggggacagacaaagtgacctgggatgcagcggggagaaaccgggagatgtagccagagagagggggcagcagaggccatgggagaggaaggaggacgggaggcaggcggggttcatgctccaggcagtggtcatgctgcccagagggcccagtggtggtgggcggcttacctggccctgctcctggcgggggtggtggcccggcagcaggctctggatgtgcaggcagtggctgtcctcctcataactccacagccactggttcagctggcctgcccgcccgcactggcccttccgggtacacctgccaggcaggggtccatcaggtcaccgtgggggtcctagactccaaggatgaccggcaacaggggcctggggaggccggcccagctggagtgcagtggggtgcaatgagcaggaggcgtgaaggggactgtgtccagagagaaaggggccaagcaggcagggcctcatggccaaggcgtgggctccagccctgagaggcaggtgcggctgggctgagggacgcacagtgactcagggctgccttaaaggattccaggggctgccgtgtggagcaccggctggaggacagctgtgtggggttctggaccctggctggggctgctgggatgaggagtccacaggccgggtggtgtcggaaaaggggggtgccaaccagattgacggctcagtgagatggggcaggatgggtgacctccgtggtggccctgagtctctccaacaggcagggttggcctcccggcacgcctagggctacttccaggggcagcctcgtggcacacaccacccgttggccctagcctaggcacaggccccgtgctcacctgcc

SEQ ID NO: 42964 - DNA, 989 bp, Artificial sequence
  DNA replication origin
cctcactgccctgtccccttccctcctgatggctcactcggaaatgttgaaggttccgcacgcgtagggccaaatggctctcccagcccacaggcaccaggtggggacctgccaggccttcgacctgtgggcaagcccctgggccacgcacctggatgtccacctgggaaaacaagagccctcagcccttcagaactcaaagggcctactgctgggcgggtctgggaagggtggagaagggacagccctgtctctgcccgaagttcgggcccacccacctcctgggcgctgtagatggtcctctcgccctctgggcagtgctctccgtacacgcagtggctactctgcgggcaccagtgacaccgccagatgctgcccacgcaagcgcgacacctagaggggcagggtggctgctcaactgagtgccctctggggtcgccacccctaccccaggaggcaggcccagggactcacggggcagccgcctccaaggcctggacggcactgcagtcataaaaggagaagttggtggcagccacagtcacgtcctcgaacatcagggccaggggcacagtgacgtggtctgggaggggacagtgggggcaggacaggtcaggtggctcattacccctccagcctccatcccagccccctaccccatgggccactcacctgtgcctggagggttaagtggcacctggtcttggggaggggtgacacaggccacgtggggcccttccacatgagccaagctgtcatagtccccgaacgcacaatggaagtattcatctgcatccaggatgggcagccgggggacagacaaagtgacctgggatgcagcggggagaaaccgggagatgtagccagagagagggggcagcagaggccatgggagaggaaggaggacgggaggcaggcggggttcatgctccaggcagtggtcatgctgcccagagggcccagtggtggtgggcggcttacctggccct

SEQ ID NO: 42965 - DNA, 2439 bp, Artificial sequence
  DNA replication origin
ctgccaagcggccaacaggagcctgggctgcctgtggtgtgctgacggccagcctgcctgtcgctatgggcccttgtgcccgccgggggctgtggagctgctgtgtcctgcgcccagcattgatgcagtgagtctcctgccgggcccccacagcccagtggcccacttctcctgccccgcactgtcctgtcctccgtgatcagaccagccctgccccaggcccccaaaccccagcagctcggcctggctgggctggttggctggccgggcacccagcactgcagagtggagcgtgggtgcgggggaccccatctgccatcatttgcctgctgcaggtcgagcccctgaccggtccccctgagggaggcttggccctcaccatcctgggctccaacctgggccgggccttcgccgatgtgcagtacgccgtgagcgtggccagccggccctgcaaccctgagccctctctctaccgcacgtcggcccggtgaggcacttggagggtgaagatgggtggggaggccctcagagatggccacccagagataaggaaggcctgtggccaagaaacctggggcactcgggtcaggggaggggtgggctgtcccctccgtccctgagccctgagcagctcccaggcctcggctttccaggattgtgtgtgtgacatctcctgcccccaatggcaccactgggcccgtccgggtggccattaagagccagccaccaggcatctcaagccagcacttcacctaccaggtcagtggcctcccaggtgtgccctacgcaggggagggtaggagggagggccaggaaggacaggcgcctagtaaggatgtcaagctgggtctgcggggagcaggaagcaccgctgcatgtctaggagggaagccatggcatgtgagtggaggtgggcagccaggccagtctgaggcacgaagctctcaggatctgttgccctgggcacttggtggcaccgtttcctgggtgggaagcctgggacaggagcagtgagggcaggggtgggttctgcccaaagaggcaactggatttgagagtttagagctccaggtctgggggctgtaagctgtggtggggaggaggctgtcccaagggggacagagtggcagtgaggatgaaagagccccacttctactccccatgcggcaggggtgggtgggaggaagctggccagtgtgcagtggcctcgggaaggagggcgtggtccactttggccccaggaggtgaagtccagagatgacctgcgcttcagaaccggagggccttgggcatggcccaggggggtgaaagggccaggctgggctgccgtgcctacccagcctgcgctgttcgccaggaccctgtcctgctgagcctgagtcctcgctggggcccccaggcagggggcacccagctcaccatccgaggtcagcacctccagacaggtggcaacaccagtgccttcgtgggtggccaaccctgtcccatgtgagtcccggcctggctgccgtcgggtggtgggcactcccataggcctcagtgggggtggtacatttagagaagtggttgctgtggccacccccagtggtccctgcccttgtcaaggcaggcaaagcagggcttctcctacgggggttgggccagggctggggtagaggggtggtagagccgagatgagagaccccactacccatcctgcagcctggagccagtgtgtccggaggccatcgtgtgccgtaccaggccccaggctgccccaggagaagcagcggtccttgtggtctttggccatgcccagcgcacactgctcgccagccccttccgctacaccgccaacccccagcttgtagcggcggagcccagtgccagcttccgggggtgagggtcagcccgcaggccagcctgtgcaccacgcaggagggaaggtgggatgcgggctgggctatgttgcccaccgcccgcccacacccgactgccatcctggtacaggggtgggcgactgatccgtgtcaggggcaccggcctagacgtggtgcagcggcccctactgtctgtgtggctggaggctgacgcagaggtgcaggcttccagggcccagccccaggacccacagccaaggaggagctgtggagcccctgctgcggacccccaggcttgtatccagctcggtggggggctgctgcaggtgagcccctcaccagcaggcgacaaggctgtccccgaccatgcccatgcccagtggggaggaggagggtaggccgccatgcccctagcagcgcacagcagagcccagctcactccacctgtggtcggccctgaatgccccacagtgctccaccgtctgctccgtcaactcgtccagcctcctcctgtgccggagccctgctgtaccagacagagcccacccgcagcgggtcttcttcaccctagacaacgtgc

SEQ ID NO: 42966 - DNA, 1228 bp, Artificial sequence
  DNA replication origin
ggcctcaacctgggcatcagcaaggaggaggtgcgcgtgcacatcggccgcggcgagtgcctggtgaagacgctcacgcgcacccacctgtactgcgagccgcctgcgcacgccccgcagcctgccaatggctccggcctgccacagttcgtggtgagtccgtgccctgggtgggcaggtggaccgggtgccgccagcatgcactcaggaaccctgcccgccccccaggtgcagatgggcaatgtgcagctggccctgggccctgtgcagtacgaggctgaacccccgctgtctgcctttcccgtggaggcccaggcaggcgtgggcatgggtgctgcagtgctgattgccgccgtgctcctcctcaccctcatgtacaggtgagacccgcccacccccagcacacttccctcctcgccattggcaagggcgccctggcaggcggctggcctggccccggccctggctgatgctggccccggccctggctgatgaagctggccccgggctgcaggcacaagagcaagcaggccctgcgggactaccagaaggtgctagtgcagctggagagcctggagaccggcgtgggagaccagtgccgcaaggagttcacaggtgggtgcggaggcggggggacagggtacccacgaggcctgaactcacacctcggcgcctcctggccccgcagacctcatgacggagatgaccgacctcagcagcgacctggagggcagcgggatccccttcctggactaccgcacctacgccgagcgcgccttcttccctggccatggcggttgcccgctgcagcccaagcctgaggggccaggggaggacggccactgtgccactgtgcgccagggcctcacgcagctctccaacctgctcaacagcaagctcttcctcctcacggtgagggccgtgtggcgggagtgcccagtgggcaaggaggtggggctggggaactactggcctgagacaaaggtgggggaggagtggggcttcccaggatgagcctccgacccctgctcagctcatccacaccctggaggagcagcccagcttttcccagagggatcgctgccatgtggcttcgctgctgtcgctagcgctacacggcaagctggagtacctgacggacatcatgaggaccctgctgggtgacctggcggcccattacgtgcacaggaaccccaagctcatgctacgcaggttggccttgacctgg

SEQ ID NO: 42967 - DNA, 1491 bp, Artificial sequence
  DNA replication origin
tggcggttgcccgctgcagcccaagcctgaggggccaggggaggacggccactgtgccactgtgcgccagggcctcacgcagctctccaacctgctcaacagcaagctcttcctcctcacggtgagggccgtgtggcgggagtgcccagtgggcaaggaggtggggctggggaactactggcctgagacaaaggtgggggaggagtggggcttcccaggatgagcctccgacccctgctcagctcatccacaccctggaggagcagcccagcttttcccagagggatcgctgccatgtggcttcgctgctgtcgctagcgctacacggcaagctggagtacctgacggacatcatgaggaccctgctgggtgacctggcggcccattacgtgcacaggaaccccaagctcatgctacgcaggttggccttgacctggacccggtggcgggggtgagggcttgccacagacctgcccccatcgcaccctgggcgggctctgtccaggggcgggtggggccaggaagccccagcaggtggggggaaggaaagtgagatgtcctcagcagggacacaggcacaaaggcctgaccctgtggccggctccccgcaggacagagaccatggtggagaaactgctcaccaactggctgtccatctgcctgtacgccttcctgagggtgaggggcactgtcccgcctgctcccagccctgagtggcagactcctcccctcttgccatgagggggctactgcctgcgccctacgtgacgaaggcccggcaaggggggctttggaaagggaaggactttgaaccctctccggggctggagacgaggcagaggcgagaagggctatcatcaatcctccctcgcttggctgatgccggctcatcttggcagtgcaggaggtggctggtgaaccactgtacatgctcttccgggccatccagtaccaggtggacaaaggccccgtggacgccgtgacaggcaaggccaaacggaccctgaatgatagccgcttgctgcgggaggacgtggagttccagcccctgacgctgatggtgctggtggggcccggggctggcggggccgcaggcagcagcgagatgcagcgcgtgccagcccgggtgctcgacacggacaccatcacccaggtcaaggagaaggtgttggaccaagtctacaagggcacccccttctcccagaggccctcagtgcatgccctagaccttggtgagagagccagccctgcccacccaccccagggacccttccctacccctccggcacctggagcccctcaactgtgtcttactatgagtgtggggcgtggagagcaggctgtagactatctgcttccctgactccctccagagtggcgctcaggcctggctggtcacctgaccctatcggacgaagacttgacctccgtgacccaaaaccactggaagagactcaacaccttgcaacactacaaggtgtgagcagggac

SEQ ID NO: 42968 - DNA, 1475 bp, Artificial sequence
  DNA replication origin
agtgtggggcgtggagagcaggctgtagactatctgcttccctgactccctccagagtggcgctcaggcctggctggtcacctgaccctatcggacgaagacttgacctccgtgacccaaaaccactggaagagactcaacaccttgcaacactacaaggtgtgagcagggacggggcgaggcagggcggggctggggcggggcagggcgaggcagggcagggcggggctggggcggggcgaggcagggcggggctggggcggggcgaggcagggcggggctggggcgaggcggggcagggcggggctggggtggggaggggcgaggcagagcagggcagggctggggcggggcgaggcacggcagggcgaggatggggcggggcgaggcagggcggggctggggcggggatggggggcggggcggggcgaggcaaggcagggaagggcagggatggggtggggcagggtgaggcgaggcagggcagggcgggtctggggcggggaagggcgaggcagggcaggatgtgggcggtgtaggcgcctggctaggggtcagcacagcctccgctccccatctctgccaggtcccagatggagcaacagtggggctcgtccctcagctgcaccgtggcagcaccatctcccagagcctggcccagaggtgccccttgggagagagtgagtccctcggccctgacctggggccactggagtccaggctgggcaggcagaactcctggccatgcatctgcctcaacttcatcccccaccccaccgagatcttctgcccatctccttcctttcttccagtccccacactgccccaccttgtcgggggagtggactgggcatcccaggccaggggcagggggtatagccctgaagccaggctcctgtgccctcagacatacccacgctggaggatggcgaggaggggggggtgtgcctctggcacctggtgaaagccaccgaggagccagaaggggccaaggtgcggtgcagcagcctgcgggagcgcgagccagcaagggccaaggccattccggaaatctacctcacccgtctgctgtccatgaaggttggtgcggcctgggtggctgggcctgagaggaggctcagccagggaccccgaccgagccagggtgtgggaggggcaggggcagcctcagccgtggatggcccccacaccctgccctccacacagcccttatcccctgcctcgcagggcacgctgcagaagtttgtggacgacaccttccaggccattctcagcgtgaaccggcccatccccatcgccgtcaagtacctgtttgaccttctggatgagctagcagagaagcacggcatcgaggacccagggaccctgcacatctggaagaccaacaggtgcctttcctgctgccccacccctgctgtgcatatggtccactgagtcccagagagaccaggacattcccagggtggatgcgccca

SEQ ID NO: 42969 - DNA, 1225 bp, Artificial sequence
  DNA replication origin
cacagcccttatcccctgcctcgcagggcacgctgcagaagtttgtggacgacaccttccaggccattctcagcgtgaaccggcccatccccatcgccgtcaagtacctgtttgaccttctggatgagctagcagagaagcacggcatcgaggacccagggaccctgcacatctggaagaccaacaggtgcctttcctgctgccccacccctgctgtgcatatggtccactgagtcccagagagaccaggacattcccagggtggatgcgcccacctggggtttctggaacttacaggaagatctagggcccaggtcacctaggccaccaggccagcttccagcggcccctggctccgagtgtgttgccagtaggctggagtacatggggcggagatcacgatggcaggccagggcctcacgcccacgcctgccctgcgcccccagtctgctgctgcggttctgggtgaatgccttgaagaacccacagctcatctttgatgtacgggtgtcggacaatgtggacgccatccttgctgtcatcgcccagaccttcattgactcctgtaccacctcggagcataaagtgggccgggtgagagcagtgccagcagcagcagctggcaggggcttgaggaggaaaggcttatgggggaagcctagagggctgtgcacagagctctgggtgggcagtggcagcatcatgggggcaccttcacctccgagctcatgcctagcgcctcccctccctccggagcaggattccccagtgaacaaactgctctacgcccgggagatcccacgctacaagcagatggtggagaggtgggtgtcagaggcatcggggctgcggggaagggggctgccccacccctaacgaagtctgctcctccaggtactatgcggacattcgccagagctctccggcgagctaccaggagatgaactctgctttggctgagctctccggggtgaggcatggcccggggggtgcgcctgtccacacgtgggtggaaagactagcagagcagaggggggagacttggggcttgaggaccaggctgggacctcactgcccccctccacgtggtgcccccagaactacacttctgctccccactgtctggaggctctgcaagaactctacaaccacatccacaggtactatgatcaggtgaggcccagggcactccggaggggaggcacagtggagcgggaggcccgtg

SEQ ID NO: 42970 - DNA, 1824 bp, Artificial sequence
  DNA replication origin
gcatctgaggcaccggtgtggccagggctagttcggagcccgaggactcgggcccgcaggaggcctgtgagctgcgggtggggtgagtggcagtgggcatgagagacgccaggggctccgggtgccccagccgagccctacctgctgctactgccgccgctgccgccgctgtccccaccaccgcccgtgctggcgctcatcccggccacgcagcccgcagctccggtgccccgggcggctgctcctgtggggcccggccgcggcctgcgaatttatagccttggccggccgctgatctcacccgcctttataaatagcctcccagctgctcggctgtgggcaaggtatgcggtgcggggagggggcggcgcgacggcggccccagagagcccggcccccgggcagaggcccccctcctgctccaggcccaccctggaggcagagggggctgctgcttggggaccaggggcaactgggcccccaggctgagcctccgcaccccagctgagggggaggtccacgcgggggtgaagcagcccgtaccccaggtcgggctcccgttctccggtgcggactgtggggatgtgctccacttggcaacctggtccttaggccaagcccccaccacctgtgcccctgtgggcatcctcctggaggtgcccttctcattcccatgggaaccctgtccctggctgctcccagccacttcctgcttcttctatgtttcatcagcccctaggacaactgggagtccagtgccctctgaatgtggcgtcactggggacccctcatttcccctaccagaggcaacaggcctgctgaggggaggcctgggagcttgccagcccagaacctgctcctgcgacgctgcctggcgctctggctcccagcgcctgctcttcctctccaccatttgcaaggtgcctgtcgtgggctgctccatagccagacatgagggaggcagcaggaagctgctcactgctggggacaagcaagcccatagccacttccccatgagtgcggtggtgactgaggggcctgtgacccaggggctgcatcatgagagaccaggagaaattgggtccccagaagcatccagggcagcacagggcacagtggggcaaggcctgcggccaagacgcgttccagcccttcacgtgctggccacggctgccgcatggttcgagggcgaggactagaggcctggtgtctgtaggcttaatgtggagcttgggtgatatggggttggggggtggtcactgagcttctgctcagcaaaagatcactctggccacttcaaggacaagggaatggagaggcgagggtggagccgggaggccagctggggcctgacagaggagtcccaatgaaagggagggggctcggcagagagggtgtttgtcccaagatattggtgcagtgtccctgtaccagggtccgtgaactggtaggggtgggccaggcattgctggaggggccagcgaggtcagagagtgggagggaaagtgaagcccgggtacctgatggcctctctttgtctgtgggtagcaggttataggcatggggctgagggactctcagtcaggagagcactgagtcagctcctgcagggaacagcaggggctggggattgggccctttgtcaaaagacatttctggccaggcgcggtggctcatgcctgtgatcccagcactttgggaggctgaggcgggcagatcacctgaagtcaggagttttgagaccagcctgtccgacatggggaaaccctgtctttactaaaaataccaaaattagtcgggtgtggtggcacacgcctgtagtcc

SEQ ID NO: 42971 - DNA, 2368 bp, Artificial sequence
  DNA replication origin
gtgggggcttggcctaaggaccaggttgccaagtggagcacatccccacagtccgcaccggagaacgggagcccgacctggggtacgggctgcttcacccccgcgtggacctccccctcagctggggtgcggaggctcagcctgggggcccagttgcccctggtccccaagcagcagccccctctgcctccagggtgggcctggagcaggaggggggcctctgcccgggggccgggctctctggggccgccgtcgcgccgccccctccccgcaccgcataccttgcccacagccgagcagctgggaggctatttataaaggcgggtgagatcagcggccggccaaggctataaattcgcaggccgcggccgggccccacaggagcagccgcccggggcaccggagctgcgggctgcgtggccgggatgagcgccagcacgggcggtggtggggacagcggcggcagcggcggcagtagcagcaggtagggctcggctggggcacccggagcccctggcgtctctcatgcccactgccactcaccccacccgcagctcacaggcctcctgcgggcccgagtcctcgggctccgaactagccctggccacaccggtgcctcagatgctgcagggccttctgggctccgacgacgaggaacaggaagaccccaaagactactgcaagggtgagacttggccttggggacatgcggcctcacggccactgcagggacccagggcagtcctgggcccacatgggccagatggtcaatggggccgaggtgttcgggggcccaggggagtgagaaccccctccaccccaatctacatctcccctgggcaggcggctaccaccctgtgaagatcggcgacgtgttcaatgggcggtaccacgtggtgcgcaaactgggctggggccacttctccaccgtctggctctgctgggacatccagtgagtgcctccttcgcctccggggcccagcactggctgggatcctgtccctgggcttgcttggggccaccctgatccccgccgtgggtcctgccagggccacagcctacaagggtctcggtattgcaggcgcaagcgctttgtggccctcaaagtggtgaagagtgcggggcattacacggagacagctgtggatgagatcaagctcctgaaatgtgtgaggcacctccctaccccactcccagctcccctggagctgcctggggcctggcaatgcgggtgcaaggcctgccggggctctgtggggcagggcggggctccctgaggggcagcctccagctggctgtgcccaagggggaggatctggaggaacaggcgagggacaggaggggttggcggcctttcttccagcagggcccagctggagcaggagaagggtacactgaagggagctgtgggcttcagggcagggtggaaccatctgtggccccttggcttttgctccaggtccgggacagcgaccccagtgaccccaaaagagagaccattgtccagctcattgatgacttcaggatctcaggagtcaatggagtccgtatcctttgcaggaagagcaaagcagtgtggcagccaagggccggcaaatgggggggccctcgctgctagagcctgtctgcagacccgcacaatgggcttgcatccctcccagtaacgggagcctctggcacgaccccgcccccaggtaactgtgtttacgtggaggcagtaacaagctagcgttgattgtccatggacgttgctattatccccaaacggcaggtgctgtctctgtggcactgccttccctttgggggactgccaagaggccctatggcataactagcatgggagtgggctggcccgagaggcctctgtgcctgctcctccagcgccacctctaggatgaccacaaaatgcaccatcccaactggcatacctgttgagactgacagggacactatcgatgatgacaccagcataatggtgaccaggactgcccaggggaggccctgcctccccacctccacacggcccaagccttgctgctcccctagctgagggtgggtggggcctgtgccgcagctggtgtccactggccgcccttcactcccagcccagatgtgtgcatggtgctggaggtgctgggccaccagctcctcaaatggatcatcaagtccaactaccagggcctgcccgtgccctgcgtgaagagcatcgtgaggcaggtgagtgccacccactgggctgcccagcctggcctgggcgggagttggaggaggtcaggtgcgactctctgcaggtgctgcacggcctggactacctccacaccaagtgcaagatcatccacacggacatcaagcccgagaacatcttgct

SEQ ID NO: 42972 - DNA, 1972 bp, Artificial sequence
  DNA replication origin
tagggccagcctaggcctccacggcccggccgttgatgacgcggatgtggcggatgacgtcctggatggcttcagatgttgtgccctggcccccgatgtccggagtgtgcatctgtaggacacaggcaggctcggcacacaccaggccctgccaccccccgctgtctcctgtgacgtgcaggactgggattgccacaggagggaagtggcaccagctaagggccagaagatggggccagatccagtaccatcctcccctgggggctgtggtcagtgcatgaggcgggctacaggaggctgcagggggagactgggcggggcagcagggtagggtgcgaggggaacctcacattctcattgtccatggatgccaggacagccttacggatggaggtggcataggagtgcagcctagaggatgggacagccagccttcagtccctggggcccggagggctggccaggggcttgcggggcactgggagccactcacttgaggtggtccagcatcatgcagctggccagcagggtggccgtggggttggcgatgttcttattggcgatactcttgccggtgttcctcgtagcctggggaggcaagacgaaggagagtgggtggagggcagaaggatgccgggcagtgactctgctcctgtgacacgtccagaagaagccactccacagggacaaaagcccaccagcgggtgccaggggttgggggaaggtgtggggacagatagcttatggggacaggctttcctcgtggggtggtgaaaatgttctggaatgacctggtggtgacggcagtacaaccctggatatccaaaaaactactaaatcatgcattttgaacgggctaaccggatgggatgagtgtgcctcactaagtctgtgaacaggagaaaggcggcaagccgcggcactgccaccggcactcactgtttcaaacaccgcgtacacatggccatagttggccccagccacaaggcctgggcccccgaccagtcccgcgcagacattgttgacgatgttgccatagagattgggcatcaccatgacatcaaactgctggggccgggacaccagctgcgggacaaggagggggctggctgaggagcagattcggaagcatgggtgagagaagcccagggcactcagggcagggggacagcactgggcaggctaatacctgcatggtggtgttatccacaatcatgttctcgaaggtgatctgagggtagcgggctgccacctccctgcagcactggaggaaaagcccatcgcccagtttcctggtggggggttaggaataggacaccagcttggccatcgcaacagtcagccagagggacggggcgtgcagagggccccaggaggctggggtctgaattctaacctgtccctcaccagcaaaatggacagaatcccaccccacctcccctaagtgtgggttctggcaaggcctcgagggcaacagggcactcgcctagggtggcacctcggtgggtagctgggcttttggaccacaaatccctcagagcaggcccaagcaggccactgcagctgcttctggactgctcgcagagaggtcaggggacatacatgatgttggccttgtgcacggccgtcactttcttgcgcccgctctcctgcgccagcttgaaggcatactcggcaatgcgcagggacttggccttggtgatgatcttcaggctctccaccactcccgccacactctgaggagggcatggggagaagagacccatgtgctactgaagagcagcactggccaaacaagctggcgcgaccgggccaccgtgggaagcaaccctgtctgcctatttctggcttctccctcgggcacagcccctgccctctaagggtacacctgtccctggttccttaagctctccccttaatcttgacgctgggggggctcatctcgggccccccatgcacacctcatgctcca

SEQ ID NO: 42973 - DNA, 1048 bp, Artificial sequence
  DNA replication origin
gaggaaaagaaaacgagctcccatgaacacgaggggcaaacgaggaagagcgacgcgtaagtggcagcggcagccaatcgcgcaccgaacggctgggccggcattgtgacgtctctggcagcactgacgtggcccctccctgagccaggggcccagctggtcgcggtccccccctcaacatggcggcagcggtgctctaggcgccggaagggggcgtgaatcggtgcgaccgcgcgcgtgcgcagtaccgggtccgcgcctgtccccgaaacttcgcaccccgtcgaactctcgcgagagcggtatctgcgtgtcgggacgtgcggaggctctcactttccgtcatggcgctgaaggtagcgaccgtcgccggcagcgccgcgaaggcggtgctcgggccagcccttctctgccgtccctgggaggtgagcagggaaagagccacgggaccgcggcagcggtcgcaggggagcggtggggtagccgcacccgaagcagtctggagtccgattggctaggggccccaccaggggcggggaaagggcttcgcgccggggttgattggccgcctccgctgtcactgaggggattggccgaagttggccctggaccggctcccccagggggtctgcatcgggtggcggggggccctccggacgggccgggagagtgggccacggcggctgtcacctccttagtgtccttgaaggagcccttctgaggcagtcactcacgtatcccggcccgcctttctcaaaccgcttcgggaatccggttccgggactcaaatttctccacggtttcctctctcgtggaccgctttgccacctatcccggtggcaaagaaccggactttgccagtcatcccccatagtcccccagtcttagagccccagatgccttcccctcgaggcgcctggaatgggaaggagctagggtttctgaggctgcgggggttttgcttctgctcttctccgtgtgcggtcttgcgtattcaggtccgagtcttctttccttacacttatttaagaagaggttaatttaggtc

SEQ ID NO: 42974 - DNA, 1904 bp, Artificial sequence
  DNA replication origin
ggagaagggacgcttttcttccttctgcccaagtaaagtgaccatgccagtggccagcactgggggcacacctgtgatgggcaccccttcagctgtgcgtgtgcattccccatcccccatgctcttgcgtgtgcttgcacgtgcacgcacacacacacccagtgctctctccacccgacccgtgtacttgcagacagggaagctgagctgaaaggagcacaagagagtgtccggcttcgctgctgagcgcggcctctccccgccgctgcgcactgcagttatttgtagacaaaggcacccctgatttttgtggtttttctccctttctgtgcttgccaatagttgttttgttttgtggacctgccctgggggctggcagctccttcaggcagcctggcagaagtggaactcccctctccactgatggctgggaagggagttggggaggaagagtgggagggagggctggggatggatgggagggaaggggagggaaaggtgggaggaatgggaagcagctgttctggtggcttccactctgaggtgtgggaacggggagcctctggggggcacctgtttccccagtgactcagagagagcaagactgcaggaacggaggggtcctgcagggtgtccaccaagaagtcacagagcccgttctgcgccccacaccatctggagcaggggcttctcttctgagtgaactgaggaaggtgcttagatggtgagggctctagaaaccaagccccatgagcagcagtggaagacctcgggccatgcggcctggggaggacttggtggcgatccgcaacctggaccccagtgagaggcggtgggctgactgggaaggagaggcccccaacctcctcaggatttgcacgtgtgaactaggctgcctgtggggtgccccttaggcttggagagccccagattggaggcagacagactgcaccaccccttccccccctgcatctcaagaataaagcaagctgcctttgtacttggttgaatcgtggcctccctgtgttcattcttattgggctggggaaagagttgtcagtttggggtgggagaaggaagaggggggcagggttagggtcaactgaaagccacgctgcagccctcggtttgtcttggatgtcaggagcagtgactgtgacctcccatggacaattgtgtggcactccaggagatataccagagtcgcctgagtcatttcagaggtgtcacagtcacagggtggtgaccagatgcagaaggctggcagaagcctgacttcagactagcctccaggcaagggccacggtcatctccatgggccaaaccgtaggtggggcccgctgctggcacatgccacagagaagtgggttccagccccatccctcccagcagggcctgatgccgtccactctggaaggcggaagctgccctccccatttggtgatcccacagtgcctagcaaggtgctcagtttgcagaaggcacctagtggatgtcttggccagatagatgaataaccgcgtcgttgccagggcccttccatcctgggagctctcagcaaaccttcgggctctatcaagtcctaggagccatgctcaatgctgggcagggtcagggcctcaaagacaactccgcagaaaacatgggcacagcctctcatgggagtggcactccctggagtgggcagtgctgccatgaaggagcggaagtggtcaaggaggcattcaaattctccagaaagaagacaatataggccaggtgcggtggctcacgcctgtaatcccagcactttgggaggccgaggtgggtgcatcacatgaggtcaggagttcgagagcagcctggccaacatggagaaaccccgtctctactaaaaatacaaaaattagccgggcgtggtggca

SEQ ID NO: 42975 - DNA, 931 bp, Artificial sequence
  DNA replication origin
gaagtcggacaaggacagcaccagcgcctacaacactggggagagctgccgcagcaccccgctgcttgtggagcccctgcccgagagccccctgcggcgggccatggccggcaactccaacttgaaccggacccctcccggccccgctgttgccacccccgccaaggcagctcctccaccggggagccccgccaagttccggtccctctcccgggatcctgaggccggccggaggcagcacgcggaggagcgcggccgccgcaaccccaagacggggttgaccctggagcgtgtgggccctgaaagcagcccttacctctcgcggcgccaccgcggccagggccaggagggcgagcactaccacagctgcgtgcagctggccccgacgcgaggcctggaggagctgggccacggccccctgagcttggccggtggccctcgggtgggcggggtggcggccgcggccactgaagcaccgcgcatggagtggaaagtgaaggtgcgcagcgacggaacccgctacgtggccaagcggcccgtgcgagatcggctgctgaaagcccgtgccctgaagatccgggaggagcgcagcggtatgacgaccgacgacgacgcggtgagcgagatgaagatgggccgctactggagcaaggaggagcggaagcagcacctgatccgggcccgtgagcagcggaagcggcgcgagttcatgatgcagagccggctggagtgcctgcgggagcagcagaatggcgacagcaagcccgagctcaacatcattgccctgagccaccgcaaaaccatgaagaagcggaacaagaagatcctggacaactggatcaccatccaggagatgctggcccacggcgcgcgctccgccgatggcaagcgggtctacaaccctcttctctcagtcaccaccgtgtgagct

SEQ ID NO: 42976 - DNA, 1114 bp, Artificial sequence
  DNA replication origin
tgagcacacatttgctcttgcaagagtcaggccgccctctccctggtaccttccacttagttacatcctcccagagctcaagccccagcctagcccagccgagcccagagtgcttgggctccctgcacccgcccagggtccgccccagggccagccctagcatgcttgttgattgtatcctgcctgcctcagattaacggtgtagacgtccagaaccgggaagaggcggtggccatcctgagccaggaagagaacaccaacatctccctgctggtggcccgacctgagagtcaggtgtgtatgcctggcagggcgacccggggccacgacatcaggctttctgtcttggaagctgctggccgtgactagggcacagatgtgccaacgacctggagttgatggagggcgggtgggcaggggtctctcagggcccgtttcccctcctggcctctgaaggctgagggggctgggacgctgcccccaggttgctgagcttcaccgaaacaagccaagtgcggggtccagagcagacaagaagggtatatggggaggtccttgaagctgtggggacaccagggcctgtctccacagctggcgaaaaggtggaaggacagcgaccgggatgacttcctggatgactttggctctgagaatgagggggagctgcgtgctcgtaaactgaaatcaccccctgcccagcaggtgaggaaggaaaagggcgctggtggggagggcgaggaggagagaactgggtggaaggcgctgaggctgtgcagggtctcccaatgcttggcagggaaatgaaccaggcctgaagccccttccgatcctcctgtgacatcccgtgacatccctgtccgtgggacctaactgagcggtacttacctttctgctctagcccggaaacgaagaggagaagggggctcccgatgccggcccaggcctgagcaacagccaggagctggacagcggggtgggccggactgacgagagcacccggaacgaagagagctctgagcacgacctgctgggggacgaacccccgagctccaccaacaccccgggaagcctgcgcaagtttggcctgcaaggggacgccctgcagagccgggac

SEQ ID NO: 42977 - DNA, 1331 bp, Artificial sequence
  DNA replication origin
cgggtgggcacccggagattggagaagttggtccctgccagctggcgtggttggaggagttctggtctgggggacgggaacgctagaggcatgcgcaggtcctctgcgtggacgctgcacactcaggtgcgagaagtgcccccggtctttgcatggctgcatgttgcccaggaaggggctctgcaggaggcaactgggccacccacccttgagagcacaagcagagcaggcctccgtgccaggcacgctgggatcggcctgcctgggagctggggctgaggtgtgagaggatggccagctggtctgacccccaccttctcctgggcagccccccaatcagccatgagtattatgacccggcggagtttatggagggcggcccgcaggaggcagaccgcttggatgagctggagtatgaggtgagccgggtggccaggccagggcccgcagccagctgcgggagccgccccgacgcctgtgtgccttcctgcccaggcccaaccccgtggccctcctggcacgcatctggctgagtcagggagggtgcgggtgaggttacgtgttccgtccatgtcggtgagtccacgtcccatgcacgtctgtcttctgtgtcctgtgcctgtgtgtgcctcgtgcatttcctgggagggagaccactgagtacgtgcgccacgtgggatggtaagagagaccctcaaagcggggcctggaaactgagctcagggggctccagaggaagctgaggggctgcgggctgaggggttgcgggctgaggggctgggctgtgctgcctgctccctcactcacgcatttctggggctttctacctctgcttcctcccggacccctcgtggcaggaggtggagctgtataaaagcagccaccgggacaagctgggcctgatggtttgctaccgcacggacgacgaggaggacctgggcatttatgtcggagaggtatgcagacgggtatgccccagccccgaggcccatccacatggcctgcctgtggctcagaggctgcccttaaggtcccagctaccagaaacagggcatcacagctagggtgctgcgtggtgaggcgatgatggtcgacggcttcagccactgtccagtgaggtagtcatctgcagaaagaggcctgtgcctgggtgggacagcagatgggcctgagaactagcaacagggttgctgtctagccttctcccgaacccatcttgggcagatgtcttgtgtatccccaggagggggatggcccctcgctcccctccctactagtagcatcccactaaagccacccttccagatggacaatgtcctacttcccaccaa

SEQ ID NO: 42978 - DNA, 2203 bp, Artificial sequence
  DNA replication origin
ggctgcagaagggcctggccatgggtcctggaggccacttaggctaggcgggcctcaggccaggaggactgagccatgcgccctccccacagcgcagcccctctgcacacaccccgcagctggtccctctaagacttgcggaaagggctctgagtggccgagctgtggcccctgatctcccaacccagcatctgagcagaagaggacaggagctggggcactgatcgccccaggcccggtcggcagggtgggggccagggccggcaggatcccgggttgcgctgccttccgagggagccggtgcccacccagcggcctgcagcccaaggcagggtgccctgagaaagccaccgccacccccagcccctcggtgtgagcaagacccccagctggtgggtccccacccaccagtggggctcccaggcctgtcgggggctcggtggtgggcctggatgctaggggggcaacgtgcggcagggaccaagctctcccgcccacagatgagtgggagggggtcgtggtgggcatgggaagacctttccaacaatcaggtgtgttggggggtgagcaaggcaggggaggggccctggcaggtggggtgccagggaccccagggctggggctaggcctgtgggtggggcgtgtgctggggattctgtgggccgaggacatgtgactcccgggcaggctggagatgctggggggtgggcccgggaagcacgggagatgagggaagaggggggaatcctgccccacctgccctggacagggtgccccataggaaaggagtgccaaggagctgaagggagagacggtggatccagaacacaccccccatcccgttccgctccccaaggggcttggttggaaggtgggaggggacagagacaaagctgcctgggtgggtagagtggtcaggacagcctctctgggtcggtgacacttgagctgagacctaaatgatgacaagaaaccagccatgcttccttccttgtagcgaagggagctcccaggagaacagactgtaagggccagaccagcaggcaacggcagtggtccagaccacagatgatggtggcatgaccccaggggtggcagtagaggtggtgggatgtggtcagagtcagcttgggttttagaggtaggctgccaggacctgctgttgggctgggggcaagggacagtgagggcttgaagaagacatcgaataagcgcaggaaaagacgcgtcagcaccggccagtacgcacagaggaaacacacacccaaaccacagtgagataccgccgcacaccacgaggaggctggaatcagtgaaaggaagcacgagtattggagaggacgcggggaccctggagcctcacgccttgctgctgggcatgtaaaatagtgcagccagggaagcagtctggtggctcctcacaaggttaggtgtagcttatgtacatgacccagcaatccccaaagaactgagaacaggcgtgcaaagaaaacttacactcaaatgctcacagcagagtatccatagttgagaacaggcatgcaaagaaaacttatactcaaatgctcacagcagagtatccatagtaaccaagactcggaggcaacccgtgtccaccagtggatgaatggatgagcgagcacaacatggtacacccatcccgacataaaaagaatgaacgaccggcacacacgactgcatgagcacagtctagccaaggcaaagaggcagacagaaagcagacgaatggttgccaggacctggaggaaggggggcctggggagtcactgctgagggatatgaggtcccttttggggcgatgaacctgttctggaactagacagtggccacggctgcacaacattgagaatagactaaaagtcactagtggtaaatgttatgttatgcgtatcttaccacaagaaaacataaaattgccacacaggaccacaaggaccaggggtatcctcacagcagtgaggaagaccgaggaaggaaggactcagggattaggcccagggcaggaaatggaaggtttttatctctagcttgaacttcccgaggcatgtggacatctccagtgccccactccaaatgtctggcccaagcccaagtcagctaactgggtggcatgtgaccattgctgttcaattaaactaggaatttttctttatttaaaatcataagatgacggccaggcacg

SEQ ID NO: 42979 - DNA, 933 bp, Artificial sequence
  DNA replication origin
ccgccccctgagcccggagccgcagacaaagagcgcgccgcgacggcggcggggtggctgcggctgcgggagcagggcggaccacactcgtcccggcgccgccacgctggtggctgtattggcaggactcctgcccgcccgccccgccaaccccgtcggaggctgagctctgtttccaggctctgccccaggcaccctcctgcacccagcggtggcaggcgcacagccgggtggggcgcgacgccctcttgctgatcaggaatctctgggaagccgagaagagaggccggagaggctaagaaaacagttgtggcctgggagactcgcaatcccaagtgcttgtcacacggcgcctgcgacccctttcactctcactggcaacgcgcgggatgggaggtgaagccacatcacttccaggggcccccgtggctgccacggaggtgggggggctgccaccttcggactccccttaccccactgctgtagagtaggaaacaagctggggaaggacagagacaggaagttatcctctgcccggggccgagctctgacctgcctgctggctctcagctctgccgtctggagtatccaggacaccttggaagcagttgtgactgtagcttccaggccaagtcaggcatcgggggatctcccaacgagtagagcatcagaggagaaaggagaagccgcaggctcactacattcacccactcagtgacccagcaaagtccccattcatgtttccccagctcgggattttgaaaattgtccgcccacaagcatgtgggaacatctgcagattccccacacctgctctcggggtttctacacacacatgtgcagaagcatttgaaagcaagatgccatcagtcccattctccgtggaaccacaacacccttagcacggaattccgcactcatacaatgggccag

SEQ ID NO: 42980 - DNA, 1573 bp, Artificial sequence
  DNA replication origin
aggacaaggtagggagccgtccgcaccctcccatcctggggctgttgggtgttggcgctccgtgggaaccagccacgggtggggtgggaagttggggttggcccgggtggggcgcgcttccgtcccgggaggcgcggtgcggcgggcgcgggatggaggttgcatagcaacgagcgcagttccccgcacacgctctccccgcaggacccagggcgggggagggagccaggctcccgccgtgcggggggcgccgaatctagatcccggcgggcctggagcgtgggagtgcgtgggcgtccccgggcgcggtccaagtccgtccgggggctgggtgcccaccccgacacccactcccgcctggccctgcccgaacgatgggctcccgggccttaggcgtctcgggtgagtgggcgccgccgggatcagcgggttgggctctctgcgggtggcagtgcctggccgggctttgcggggcgtggaccagcagggccccgcggggagggaaggagacgcggggcccggagctcggacctggagcccagccccgcggcccggaacggggcttcttgcctgtgcgtggcgtgactacgtgagtgcgttcctgtgccccgtctctgtgtgcgcggaggctcccccggccccgcatttgtgtactttctgtgtgcaccctgcagactgtctagagaaatgtcccggatgctgtgggctgagacctcctagggctaagtggagggaggtcaaggtcaaggcacccaggagcagacagggctcagacaggtatgcgtttagtggcctggattcaactcccgggtttattggtctggactgggaaggaatcaagtgctttgcaggaggggtgttggcttgggagaacgtgggggaacccgtgcagggatcggcgagaactccggggcgggggcgggggcgggggaaggaggggctgggcacgggggagaattcccaggaatccggggactgacttcacgctgtgagccgagctcctctggccacctggtgcgggagccgaggggcagggcggggacgcaaatcttgccccaccctggcggagctcctggtcctctctccccggcccttctccgggggtgcgcggggccctcggcttctcccgttcgctgtcctccgccttcttccctctcagttcccggctgccactcctcgtctcttgttcccgctgtttggaaaccttgtgtggccattgccagccccctagcgggataggaatgcgaccgagagggcgtcctgtggaatccgtgttggattccagggctgggatggttggttgacggggactctggatcccatcctcctgcttccttttcgggagtcattccatcaaacggcaagcgatttctccaagcgattcctccggggccgttttgactttcctggagaaggattggtgtcgcacttcatttaaggccaacctcgtggggacgtgtggataggggagagcgacccgagctgcaccccaggcctgaaatgagccatgggacgacaccggtagcccttggggctccccacagccctccgggaaggcctcggcaggtcgggc

SEQ ID NO: 42981 - DNA, 2390 bp, Artificial sequence
  DNA replication origin
gcgcgggggcgcgccgggccgccaggggccgtcaggggccgtgggccgcgcgcctccccgcccgcggggcccgccgctgccgctgccgcctccggctcctgcccatggccgccagccccgggagcccggccctcgcgctcggcgccgcggcccggcccgcgacaggggggcagcggcgcggcggcggcccccgcccgcggccaggccagcgcccgcgctcccgcctcgcccggccgcgctctcggagctcccggcgcccgctcttcgtccagcagccgctggccgtctccagctcccgcccgggacgacgggcacgcgagcgcgcccacggcggcgggggaggggcgcgggcacggggcgcacgcgcgccgggaggggcggggaggggagcggggccggctgcgggagggagcggcgggggcgctggagccggcgcgggaagccgggggcgggcgctcgacggaagcgggcgggggtcctaggcaccccacgacacccggcgtccggtcctgaggggcgggcaccaggcgcgttgtctgcgcgatgccgctctgggagagaggggtcctgccaggaggagcagtctcctgggtcccccagagagagtccgcgatttcagcccctctccccggtcttggacgcagcagccctcacgcctctgctccttcctcgggcttcgccttaaatgactgcatccctccttcaactcagccattccctgctgtctttgaaacggacacctttgtttaaaacaagaaagaaagagagaaagggaggaaagaaaagaaagagagaaagaaaaaaggatgagcgaagcgtggggagggggtgggtcgtggggagagtggcctcggaggccttgggacccgggcctgcacacagcactggccagcctgggcccgccgcctacctgttcctcagccccagccctcacccggtccccgctttcacagcccttccatctcttcctcttctctcccaccacctccccgtcttcttggacaagcctggagggagaaggcctttgcctggaaagcagcagcgggtggaagtctgcgttcccagaggctgccccggctgcaggagatcacttggagaaattgctacatgcttcatttccaggtttgggcaagtgagggaacccccagccacacggggctgttgaatcggagcccttcctttcctccctggctcctcgttagaagagaaatcaagaatggcgggcctgcccagaatgtggagaagagaggcgagtttcttatccagggcttctcccagaaagcagaacttgagacaagggctggtgtgcaggttgcaacctgccacccaatggctggctagtcttgaggaatggcgtcatattgagggctcagcatcggtctctgcagctggtggatggaagaacattcactagcggcagtgtctagatgagccgtggtaagaggaagcccttgccgttgggcttatacagagcctccagccctcccaccatggccactggcatcgtgggtccatcgcatcctggggagaagctggctgacctccaccagatggtcccctctgttcgctagcttctggcgcgccccctccacactgcatgctccccagcggcatgggcgcgaagacgagcacggggccccacactctccctgagcactcccgtaggtacctcttcgccaaacctgtctcttcttccaatcttcctccacccgggtccctgaccagtcagcccagccattttccactgcccgggggtcatggacaccttcatctcaggccatttctccctctacaaagtagacaacctagtgtcttgctcccctagaggatgtcccctcactgctgtctctcagggccaccctgcaaagggcctcagtgtgacagcaggtgtttttcctagtggtgacatgagatgaccagtcgaggacctgggtctgagtcagtcatggggacaccccatcaccacctcccatgaggccataggtgtgagctgaaggggcataccagtgtgaaagagccgggtgaccgggggtctggactgcctgggcctcaatgtgccatctccacctcaatattcagttcacaatgggtggcttgggtcacacaggccctggatgccccatgatcaggctgtaagtctctcctaggtcccagtagcatggccacagctatgcttttttcagtggtgagtgagtagctctgccaccgaaggtgtggccctgccacagcctctatggtccctgctgggatccttccattgaggcttcctgagggttccgcacagcatcctggcctaccatggacagatccctccagcaccgttaggttggcgggctctcgctgctggtggcagagcagcttgccccgcagcccagtcctcctgcagggtc

SEQ ID NO: 42982 - DNA, 869 bp, Artificial sequence
  DNA replication origin
atgaccccgtccaggaagacacccccgctaacaccccgaccccacgaggcagccgctcgccggcacccactgctgttcatccagtagatccggagaggctctgcacttgggggagggttgcaaggcagaaccactgactccccttcctccacctccacgggcttcactgtctcctttggccacttgggggcacctagaagggacagacgggctgacactctcctcctggtccagatggtgctaggcaggagaagggaggtgggggcaggggggtggcgggctacaccagggatggacgagggggcgagagggtcaggccagtagaaacttcacagaaaaggaggcagacactctggataccttctggactcatagcagagactagcacttagggaggccagggtgagcaggagaccaggaggccaggaagggttaaccttccacggttctcagctctccctgcccaccctaggaaaggacgggtggggggaggctgaggctgaggtgcagtgatgggggaggggagctgtggagggatgcaggagtcacagacccttccatcatcctgacacagaaaccatggcaacggttcccaaggtaactggaggggtggggaggggagaggagagcgctcaggaagcagaaagctcagggaggatggaatgcaaagggaaaaccccagggaaaaggcgacacagatcaagacagagccgtggagcaagagagaccaagtcggaggtggaggggaggagatggagagccaagtggaaaagccagagaagaggggccctgctaaggagtgcaggtgtagacagagatgactgcagtgactcaggcaggtctgcccagaatcagtcactccccccacc

SEQ ID NO: 42983 - DNA, 1082 bp, Artificial sequence
  DNA replication origin
cccaggcagcagagaaagggagagaagaggaaaccggagcacaaagggtgagaggcagctgcagagtgcgccgctgagaaatggcagaaagagcgagaagagtgaggggtgggggtgggcgtgtgcacgtgcgcgtgcgcgcaggccgcctgcacagcgtccttgtccctgggggctgtgccaggcaaggggcggggaggagggaagatgggcctgggtcagtggaggggcttcccggcgtggacgtcacgctggcctgggagcagggtagagagacagacagagggtggagcagctgtgagctggggccggaggggcctacaaagccccacgcaacagagcatcaaggccctgcccacttgtggcactgggcaagggacggccgtgagacaggatgaatggcacactgctggctgacccatgccatgccagggaacaggtgggggtcgggggattcctgctgcgggtaggaacggggggagggggaagcacccagaaaatcccagggaagccttccaatattgctgctggctgggagtaagtggtcacctggctggaggagacgcacatgtgttaggccaagagtgagcctgcgtgaccatgcactgagtggacagtggccgctgtgctggggcagttgaagatggggccattcctgagtaagtccggtcccaaacccatcctccccggtgggaaagggccagggaggcaagggtcacgcccagcagcctacagggaggggttcagccccagaagagccttgccccatcccaccccacctggcctcccactacacccgcaggtccctcagggagtcctctgtcctctgctccaaagtgcctgctttggtctgatgggaagcagcttgccagggagggacctgggaggttgtggagcctggctagacctggagtgactgcctcctccctgaaaacacacacacacaccccatcaccaccaccaccacacaccttgagaagggaacctccagcggtgccctgcacatgtgccctgcacacctgcctgtcagttctcaggttctgcctggagttcctctcaaaggagaagcaacaagagagccc

SEQ ID NO: 42984 - DNA, 934 bp, Artificial sequence
  DNA replication origin
acccgcactgggatggacgggttcagaagtcctctttggccaagtgcatggagcccaggacgctgccaccctcctgccccacccaacccctggccctcgcagctgcccctgctgggtgtaagggccagagatgagcaggagctgctgactgacagtggctgggcactccctctgcagctttccaacctgggaagaacacggggacctgggctgggggccactggacaaagaaaagcttctagaaagaacagcggccagaccctccccagctcctccctctttttccagccacagccttcaggaagccacaaagaccctgttgatatctggggaagaggcaagctgggcgggctacctcccccagtgctcgtctggctgctgctcaccaggcaccccccatacagccttccactcagacaaggcccccatggggggtctgggcccaaccccaaggcgtagagtccagcagaagggtgctgagtggctgctggacagggcacaacctcagggccctcaagggtgaggcaggggcagctgggggggacaaggagaggagcagagcggtggaagacagacaaaagggtaagcagagagatggagcagagccctgacgggaagggggaagagggaagggagggccaggcaggcagaggcagagggaggagacggggagtggtgcaccccatccccggcagcagcaggcttctgcctagaaggaggaggaaggtgatggccctgggggtggggcacagggagacgtgggaggctgcagaggagagagcaggggggcgggggaagcaggagaaggaggtgtccgagatgggccagatcagagcaagtaagacagcgactgcaggggcagggatgctgcaggcccattccagatggccccacccagggacccagccccagcccattgcaggggcagaggaca

SEQ ID NO: 42985 - DNA, 1423 bp, Artificial sequence
  DNA replication origin
gctgaacgtgtttccctcttggtgatcagatcactagcgattcttaatttcttttgttcttttctgtatatttcaagtgtcctacaataagatgtattactttcgggatcatacacacacaaacatcaataaatatggagagagactcagatgcagcagagagaaatgaccaggagccaaggaggtgggaaggtcccaggcccaaccctgccccaaacttcccatgtggccaagacagccgagtcctcaaaggctctggagccctcaggtgtgcacatgtgggcactgcatgggagctgtgccaggggagaggccaggctgggccaagtcccaccacctgcagcaaggagctgacgggaggggagaggccctggggaggcccccgccccagaaagatgatgctgggcagcagcccccaggggaagaagggcggactgcactgatttacgtcagggccacatgagtcagcagagatggcactgggctgccccgatgcccctgccctcagggtggggttaacaggggcagggtatctacctggggggtgccaggcccccactccttctggagaagggggcagatggctctaggcctgccttcctgagagggacagtgataggtggggggtccagataccctgtcgggggcaatggattgtagtgcgtgttctttgcaatccctgccaaccaagaggccccaaaagtctgacctggaatggagggaataggaatcgctgacccctcccataaccgcacagagataggaagatgtggcagtgggcaaaagacctgcagtgcgcagggaccgcctgagccagtgaggcccaccttccctcacccctacctgatggaccctacctgatggacacccatgcacgggaggcacagcagtgggtgcccgaaccgacctcacccactccagccctgactggccacagagcctgtggaaacgggctccagaggcgccctacgcctccggggaggagcccctggctctgcggcaggttttcgggtgagcccggaggagcccaggctgggatttggaaagaagaaggaggagaacaaagcccccccaaccttggggcggaggggcaggcagcgcccagtcccgttcactcccctccccccattgcaggggcggcttatcccgatctacccctcaccacgctgtcagccgggattttcaaccaaactgagctctcggctggggatgaggggcagccacgcccagggccacaccccacggcggcctgtgggggagcgctcgacccgatctggcttcctttctcagacacgcacacacgcacggggacccgccaacttcagcccccgcctgcccacacagaccctgcctgacgccccccgccctgttctcccgcccaggccagcatctggggccccgcaggttacccctcacctgtcgg

SEQ ID NO: 42986 - DNA, 2276 bp, Artificial sequence
  DNA replication origin
tgtcgccgggggatcgcggccgcggcccgggtcgcacggggaggccagcccgccttacctgcgctgcggccaccgctcgggctgcccgcccagcctccgcgcacgccggcctcggacccgccgcccgagcgcgtctgcgatgccgatgctgcggcagcagcggctgtggcggggcggggcgggcgtgcgcgcaggggcgggggaggggagcgccggggaggagagggagggaggagtgagatcacctccccggccgcccgccccgccccgccccgccccgccgcaccctagcccctggtgccagccgagcgcggcttgggctgggggcccccgggcagcccactccgggagctcagcgggaccccagccgacgggtcccgccagacccccttccccgcagaccgggagtctccggccggagagtgtcctcagccccagcgcaagggagcccgctgtgaaagctcggagcgggaatcgcggggcgagagtgctcccagaggcctggggccgggcggtggagagaggagtccggcaaggaaggggatgctcccttagcctcggcctggccctcgacggcgccggccagcgatgggcacctgcacgcaacgcccccccaacacacacacacagggcaggactcccgggacctctcccgaatgccccccgatcctgagggcccagtcagggtcctgttgggaggggtgcgggggcttcgtcctcagcgtgttggggaggcgccgcggagcaccggctcctgcgcaccccagagcccaggtgggcggcagggtaggaggcgagcccaggggagacagggtctgggagagggtatccctcgaactgccacccccaactcccagattttcctccagctctctggtgtcttatttctttgtcctcgggattggccccattcgacctttcccgccgactccactctctcccactctcccccgcagccctgcacaggatcgagaaggaaggagctcctccccagtgccccctcctaggctcaaggccatgacctcacaggcgaggaagcaaaatggagggggtaagaattccggagccggcgagctggctgcagcctcagggctaggaaggcctagggccccgatggcagattgcagatctggcggccacggtatttttatgggcatgcctgttgcccagtgaagcattccaggggccctcgactcagtctcacaagactccccaagtggtgtggggccctggagggcccacatgggagcagccctggcatcctggcttggatgccccacccccatagtgccagcttcagttcccctggaatgggaagcttggggtggacccatctgtgctcagagagggtctggatgccatgtttgcccagcctttaggaggagaatggacaagactaggcacctgagtgaagacggacggctagggagactgcttccagagtgggggcacttgcagggcatcttcaggtgacagcagaggaaactgagcccgcctgggtcacgaggccagcaggctcatgagctgggccaagagggcgtactttccatgaggcactgagctgtggtcagcttcctgcctttgctgatctgaactctgataggcctctctcctttccagttgctgcctccactcactccctacgttcccagcctttcctccaagccccaacttctgcaaatcctttacctaatctagggtttgatgcccatcaggatggtgaagtaagcagggaatagagcccgtttatacgcacctgctaatgtgtagtgatgggtccatttatggtaacaaaaaattcattactaggattacacgacatcacatttcctgagcacagccatggacctgccatcgttacatttcctgcacatttaaattgcacaccaacctggggaggtctgttgaagcattcgccccacgttacagatgagaaaaccaaagcccacagagctcaaggctgggtccagcaagcacagttaggaaggtctctttctctccactggctcattgcatccacacacacaccccagatgatggtgctgttattatcctcactctcccagtgaggtacccaaggtccagagaggggcagtcatgcaaccaggaagaaattggcactatcagtgcccccatttcacagatgaggaaaccaaggttcagaggggtcaaatgacccacccaagatagcccagaaggtaaatggcagaactcggacttgaattcccttctgcttgaccacgatgcccattctcacttccatgtaatgaagtgga

SEQ ID NO: 42987 - DNA, 856 bp, Artificial sequence
  DNA replication origin
ccacattgctaggggaggtcccaacctgctgctgagatccggcactgcacagcctcgttcaggcagagaaactgataaggagatggttgtctgctcaccccaaaaggttagcatggattcctcgccctagccggctttagacggagggaacaaaggctttcccaaggccctgccagtccccacccctgcccatcttaccaccgtagtctccctcaatcatcaagtcccattgcacagaaggggaagctgaggtgccaagagctggcgtggcctgttcaaggtcacactactgggcaggggccaagcaggggctggagccttgctttcctattccccagccagggtccccaaattctctgccagttgagggaagccatctcctattccactgatctgggtggcattaggaaggccttttctatgctcctagattagtgacagcatgcggttattggggacagcatgaggatgtgcatgcgctgaggagatgcagctgaagcgtcaggcctggggtgccagcactctgcagcctgcccccaaggggctctgcaaaaacatggcaaagatgcggggtgtgatgtgcacctgtgtgtgctgcgggtgtgtgcgtgtgtggtgttggctgtgcgtatgtggtgtgtatggctgtgtggtgggtacatgtgtgggtgtgtggcgtatgggagtgtgtgatgtgtgcatgtgtgtggtgtgtaatatatgtgtgcatggtgtggtgtgtgtgtggtgtggcgtatgggtgtgtggtgggtgcatgtgtgtgtggcgtgtggctgtgtgcatgtatgtatgtggtgtggtgtgtgcgctgtctctggaaaatgcccaccctgtg

SEQ ID NO: 42988 - DNA, 1743 bp, Artificial sequence
  DNA replication origin
tgtgtggcgtatgggagtgtgtgatgtgtgcatgtgtgtggtgtgtaatatatgtgtgcatggtgtggtgtgtgtgtggtgtggcgtatgggtgtgtggtgggtgcatgtgtgtgtggcgtgtggctgtgtgcatgtatgtatgtggtgtggtgtgtgcgctgtctctggaaaatgcccaccctgtgttcccaccaccctaacagggccgggaggggccagggtgctgccaggctctctgggcaggaagaggaggccttggccgcgggccggacttgggcctggtccgtgaggctgttttggtctctggcttcacaggcaacagagaagacagacaaacaggaagaaagcagctgccttgggctgggctgggctgggctggcctcggctgagccaagccaggcctgggtgcggggggagtggaaagagaactactgggatgggggctggagggggtgtggggacaggggaaggagagaggtgttgggggagggaggaggagggctcaggtacagggaaggtgcgtccatactcatggtatgttcaagaacatgagcgagcgtctctgtgttgtgtgtttgtggctgtgtggctgtatcatgtgaggttgtgtgtggtgggagggagcccgtgagcacacggaggtccccagcccctcttcctaggacaggtagttgcaggtggggcaggaggaagagggtgggggtgtccctggatctcacaggggttcgtgaagcctggcttggcccctgccccactcctccctttcctgtccctcgtctccggccaactgggccctaactggggaggaggaggggcctgcgtgggcctgggaggggcccagcgaaagtgttttcaccccttccttgcctgggcccagcgaggagcaggaggaccccaacttgggaagggggcgtgaagctcccatgaaaaagcagcgcagtcctgggccagacccaccgctctctggcctcagtttccccacttataaaatgggaatgctgaactaagtgacctcccagagcactgccaacccagacaatccaaccaggggggcgtggtagggtgagggtgggcgtggaggctatggcagtgggaggagggagtcctgggccgggaccagggaggccctggggaaaggaagggaaacaggaggccaggggaggcctgggggaaagggggagggggaggaagtcccctcctggccaggtcactcccagaggctgggctgggccagggcagggcagccgatggagagcagatctgagcacccagccaccttcacgccaccgcccagctgcccaggagcccagccaggtaaggggctgcgcctgcctgcccccctgcccagtccccagccctcggatggtggcctctctcggcctcggttggggcaggggagttctgcgtgtctgtctggggtgcccactcccaaacccgggactcatgggctgcctgggggatcctgggttctgtgcatccgtctgtctgaccatccctctcaatcttccctgcccaggactggccatactgccaccgacacgtgcacacacgccaacaggcatctgccatgctggcatctctataagggctccagtccagagaccctgggccattgaacttgctcctcaggcagaggctgagtccgcacatcacctccaggccctcagaacacctgccccagccccaccatgctcatggcgtccaccacttccggtaaggcttgcccctccatgagtccggt

SEQ ID NO: 42989 - DNA, 891 bp, Artificial sequence
  DNA replication origin
taaggctgtttacctggtagaggcaagggactccagggcagattcaaggctggcatttgtagctgggctaggtaacaggcggtgccatggcaggcgcttggcacgccagggaggatgaaagggacagatggcagggaggcaggagggggtggctggttggggattggggtggggcagcagcggctctcgaaggagcagagcgaaggctcaagatgtggccctggcaagcgcacaacctgggggaccctgctccgtgctctgtaccatgggccctgtgaacactgtcgggctgaacgtggaagcccgcgggacagttgctaagcccaaggaggagagagcccaagaacatgcgggtgtcccaggtgtggccaagcccccaggcccagggagcccagggagggtccggtagacacggaggagcaggagcgggagccagggacagggcagccaggagacgccatgggaggacattgactggggagtccccgcacgctggcggtccctgaggccatgggcagggggctgtgatctctgccagggaaagagtgggggcgagaagaggggggtccccacttccgggctaaaccaaggaattgctgtcctcagaggagactgtgacagagacaccaacagggacaggagggatgccaggtgcaaagtgggggagagtgacctggaggctgagggactggggatgttggctgagggcttgctttgggagtgggaggaactcaggtgggtcttgggcagggtcagtcgggggaactcactggtcactctccctttctttcccctccgctaggctgtggcacagaacatggactctgtgtttaaggagctcttgggaaagacctctgtccgccagggccttgggccagcatctaccacctc

SEQ ID NO: 42990 - DNA, 761 bp, Artificial sequence
  DNA replication origin
ctttggccagtgggagtgggaggagttggcagatgaggacgtgacagaatgacccagcttgtgacagggagaggctctagaggagcttggggaccactgggccagcctcctttccttggccacaccccaggatgggaggagccactgcccagctagctcagggacttcccagggcccccaccaggctccctgtctgtcctgcaggccagagccatgcacctcacctgaggccatgggaccctctggacacagacgacgctgcttggtcccagcctccccagagcaacacgtggaggtggataaggtgagagtgggtgtgtggcaggtgagggacatctgtcctgggggatctctgcctccccttggaagccaaactcctccctcctcgaggttccagtcgttgccctccctggccttagctcaagggaacctgccgccagacacacaggcccaaggcagagcctgtggagggcaggaaggcaaagatgtgagggcgggtggggatggagagggacggctacggaggcagggatgagagggacagaagacacctggcttgcacgttgggattcatgttcagcttcagagcagggagtggcagggctgagttaaggctgtttacctggtagaggcaagggactccagggcagattcaaggctggcatttgtagctgggctaggtaacaggcggtgccatggcaggcgcttggcacgccagggaggatgaaagggacagatggcagggaggcaggagggggtgg

SEQ ID NO: 42991 - DNA, 784 bp, Artificial sequence
  DNA replication origin
ccacaccccctcccacagcttggaccccctctcctccccagacctggagggggtcgtggaggctgtggcctgctttgcctacacgggccgcacagcccaggagctgagcttccggcggggggacgtactgcggctgcacgagagggcctcgagcgactggtggcggggggagcacaacggcatgcggggcctcatcccccacaagtatatcacgctgcccgccgggtgagtgagccgcgccctcaggccccagggctcccggagtctccccttcatccacccctcccccgaccccaagttagattctgaaggtctgggctgggccagagaacagagcctctctgaccactcctggctggcgcggagctgctggccctggaccccgtgcagggaaggagcactcgaaacaggccggtccttcccaccgcaggacggagaagcaggtggtgggcgcagggctgcagactgcaggggagtctgggagcagtcccgagggcctcctggcatcggagctggtccaccggtgagcaagaagacggggctcagggggccacacgtgtgctgttctaggccagaggggactggggtcaggctttggccagtgggagtgggaggagttggcagatgaggacgtgacagaatgacccagcttgtgacagggagaggctctagaggagcttggggaccactgggccagcctcctttccttggccacaccccaggatgggaggagccactgcccagctagctcagggacttcccagggcccccaccaggctccctg

SEQ ID NO: 42992 - DNA, 1306 bp, Artificial sequence
  DNA replication origin
ccaagacacctcctgctcctccttgtcacctgtggggtgggagaacattggtctgcctctcgggccaggggtcttcaaggcatcccagagagaaaggtgtggataagagccaaggacaggcgggaggggaggaccgtgggctagacagggtcctgggcaggggagaggcggggaagggggcagcactgggcccacctcgctgaagggcctcctgcagcttctcgtgcttggcctgcagcttggcgaggatgctccgtccactcagatactcctggagcttctgggcagccccaagaagagccccaagtgttagccctggcttgagcccctccctctgccccagcaatgcccccacgggtcccgcccaccagcccagccctccccaccgtgaggtagaaggtttcggtctcctgctgctggccgcgcctccggcccgcctgccggctgcctgggtctgagctggtggacttgagggactcggtggaggggctggtctggaaggaatcaagcacatccccgtcatccgaggccaccacctccagcagggcctgcagtgtcgccttcagagtcttgttcacctgcagaggagaccacaccagggtggtaagaggtgggggacagggagggagacaggaagtccaagtcagaaggaaggggccaaagggaggggggcaggcagggcagccacttccaacagcaggctgtacaggctccaggccctcgtctccctctaacccccggtgggctgcccagacctcctctgtctcaatggtctgtcggtccaggcggctctggatgttctgggctctgggcagaatctcgtcccgcagctccatttcaacgcagatctcagccacctgcagagggcggcggccagggggctaagggctgggcttgggcagtaggtgccaagatccccggggcataagggaagcaagcacccttttgtggcctggcggccgggcacaggaccaccagcccagacgctcagctgaagaatggcaggagtgaacacacgtgtccaaaccaagacttgtccacagaggttcgtggcggcaccactcatccaactgacggatggctaaactcagcgcggtctacccacagaatggaagaggattcagccacgagaaggaatgaatccacttatgtgaagtgtccagccaggcaaatccatagagacaggaagcagagtgggtgccagctggagcagtggggtgccagtggggctggagaggagaacggggagtagtggctcctttaggggtgacaaaaatgttctggaattacatggtgatggctgcac

SEQ ID NO: 42993 - DNA, 1205 bp, Artificial sequence
  DNA replication origin
agacggtgaggaaagggctggggaggggcctgccccaatggtccagggagaaatgccactcacagtgggggaggaacaccgccagaccatcacatcaccccaagccaggctcagggagaagcacgcacctaggggcaaaggcctctctccctaggcacagggcgttaggctaagtgctcacatgggatcgcccagctctgaggtccaagttccagaggggcaggggtagagggctgggggctggcccagccgtggccttcaccagcaccaccttgctttgggtctccctgcaggccaagaagacgtaccaggcatatcacatggagagcgtgaatgccgaggccaagctccgggaggccgagcggcaggaggagaagcgggcaggccggagtgtccccaccaccaccgctggtgccactgaggcagggcccctccgcaagagctccctcaagaagggagggaggctggtggagaaggtgggcctggagggcacctcagacgcaggcctatgggccatgggccctaactaggacctgctgtgctgagggggaagtcagggctgggtgcaggggagggcaggagtggcaggacagtgccatcaggttccagggattccatacggaaggctcccagggcctgagagagtggggaaaacagttgcctggccctggacagccccatgcagcctctccatgctcccagcggggcccctgcagctctgctgttctgccagccattccgtaaggtttcagaggggggcaagaagacacttagggtgggtgatggggtgacacgcacggagaaagggccttcgaggtgagcccagtacagagagtggggaggctgggaaatgcctggatggagccgccaggctgtgcgtggctgacagtcatggtctctgggactctgggagcagaggagggagtcgagcatctcaggtgttcttaggggaaatgacagagtttggctgtgttgggggaaggtctccctggctgctgtggttagcgtgccagctttagccaggtgcggtgactcacgcctgtaatcctagcattttgggaggctgaggtgggtggatcacgaagtcaggagttcaagatcagtgtggccaacatggtgaaaccccatctctactaaaaatacaaaaattagccgggcatgatggcgggtgcctgtcatcccagctacttgggaggctgaggcgg

SEQ ID NO: 42994 - DNA, 1102 bp, Artificial sequence
  DNA replication origin
gcggagcttgggccctgccgtggcccccctgccagcacatcacctaccggaagctttggtgctcccggctgctccccaggcggcctccacggctggagaagcgctcggccagcttttccaggccccgggagtattccagctccacctcagcgcggcgccgcatgaactctgccagctcctgcagcaactcccgccgcagctcgccctgcagctccaggcagcgcagctgctcgctcagctgccagcgcatctctgtggggggaaccatggctcaggcctggtcagcacgccctgcctgggtcagccaggccagcgtgggatgggagaggcagaggcacacagaccccagtcccgtcggctctgagggctccttcggacccagcctaggctgagggcaagagctaagaggggaggaaagaagctaggcccctgcaggcagatctggcctcagctgtccagccgacctctgcgctgaggccaacagatggccagagccacccggttgagggggaaggggaagggtgtcccagagagaggggagagccgccccagcgccagccaggcacctttcagtttggcttcctgtctctccctcgttcctggaaagcctctgaatggtttcccctgcgacttcctttcccgccggtacccaggctccgggaggtggcagcctcccttgcaaacacacggatacacaacacacagatcacagtgctgctcagggcaagcctgcagcgatctcgcagtctcagtggctggggaagcctgccctcaggccccaggggaaaggacagtccacagtgagggctgggagccagggagagctgatccggccttgtaagtgaaagaatggggcagggagctagcccccgtcttctgaccccacttcccactcccaatcaccccccgccccacctgtgcattcccccaccctgcagagagagtcacacccagggccccatactgccggccttttgacaccctatcactggcttgatttggcaacgctgcttcccccacacaggcctgaagcaaagaagtgcctgtccagcaagtttaagcaacctgcggaagacacttttgccatctcctgagtgcccgt

SEQ ID NO: 42995 - DNA, 1306 bp, Artificial sequence
  DNA replication origin
gggagtccagagcctggggcagcaatggtgttcatggccactggtacagtgggccagcggccccgctgtgaatggtacagtctggcagtggtgaccagggacagccttctggaggtggtgggatggcagcctgggatgccagcttacgttggggctctcacacctgctccggctgcttggcagcggggctttgggcacaaggcagcctaggtgcaggcccaatgggaggggacggcaaggccggggcacagtggggctggaaggggcgccctgcccccccaggagcccctcgcgggcagtgccagccctgggccgccccgccccaccgggagccgcgctgggggcggggctgggcggagcccgcgcagggtgctggccgcagcgcccccaagtcccggcgccgggcccgctcacggccgcgtgggagcagtggggttcgacggcgcggccgcgaggccgccatggccgctcacgggaagctgcggcgggagcgggggctgcaggctgagtatgagacgcaagtcaaaggtgagagggcgccgggcgctcccggcccgtttcctgcggagaacccaaggtcgtgagggagctccaagcgtccccgcgctggcccagggcccgatgctctccccagcgacctctggagcgggggtggaggagggagcctgagccccttgcctgcctcccgacgcccatttggcctcaaccgcctgccattttcccttccttctttcctgtcttccttcctttggtctctgtcctccttgggtctaccgcttctcacccaaggttcagtggagacactggtggccgctggtaaaagagagccagatgcaccaacgtgcccctcagaaggcagtattttagctacagtgaagtcaaccagcttgattgggctggggggtgagtaagggagtccgggtgagtggattggtggagatcacctggccgtaaccccactgcagtccctggagcttcagcaccttttgcctccctttagcactgagggggagcagaggcgagggccactgtctctgggtcaagctggcgcagtgagtcttggttgagagatttaacagggctggcttctcagccttctgaaattgaacctctgggttctgataaacacccatgtgcaaatcacatgcaaatcagctttgcaaattcttagccaatagcttgtgcccatcttattcagggcatggtaactcttgcaaaggaaagaggcagcagctcagtgccagcagctcgtccatatcactctcaatcactccattttaccaattacggaaacaagctcagagag

SEQ ID NO: 42996 - DNA, 2077 bp, Artificial sequence
  DNA replication origin
ggaagcggagcccagagcgcggcagggcggggccggggccggaaaggcgcgtctgcgcacgcccacagctctccgcttcccggctcgggcgaggctgtgttgattggcttaagacgtgggcttccctttgtatgggccggaggcggagtcctgtcccgccccgcgcctggcggcagtgtcttccggttcgcaagcccgcggcgaggttcgttcccaggctctgattggtccggcggcactgggctcgcgcgcagggtgcgggggaagggcgggcttgcgcactgcgtcggccgcgccccggcaccggtggaagggaggtgtcccaggctcccacggcgcccgcggcgccctccttccgccccggccaggcccatgggacccggcccgccctctgccgtccgtccccggcgggcccgatgcctgtcggccgctgagcctccgtccccatgcgggcaggtccgcgccttctgcgggctgcctggcttttggatgctttgaaggggaacaatggagcgaaggatagacggagcagcagggggcagttgcgttcagggccttaaatgccaaacaagtgccctaaaagccagggcccaacactcaggccctaaagtacgggctgaatggggcatcctaggaatagctctggagtgaaaaaaggagtgaagagagcgtttgaaggcaccggctgaggcctttcctgcctgcctgagccctgtggctggctctgctgggtggagggacctttggggaccagtcagggctcggatggaggggcaagatgtgttggggccagctagtgagaggcggggctccctggttccccttggcctgaggcagcggtgggacgtgtgagtctcccgaccaggagcaggttggagtgtgggtgcggctgtacgcgctgtgggcaggggcgcaggctctctagtctcgctggaggactcgaacatcggtacttccgagaccagctgctggaagtccaggtcctgggtctggctagctcccaggccttgaagccccaggtcctgcagacacacacgacgacgtgttcgagaagggccttggtactgggagaagggggcggggagctgagggagtgtttttttccttctgggcaagagaattaattgctcacagttgaaaggcaggaagtacccgcacagcctcccctccccagatctgcaggtcaaggtcatgtgtgcccgcatttgcacagagcctgactctgacatccgtgcacacacacgcctagtacccctgcactagtgcccccacgcccgccttcggaacacacgcctggtgcccaagtgccttgcctctctccccacatctataccccagggatttccctcccaccaaattgaagccagttgtctgcttggcttgtcaaccgcctcccgcctcccgccttcccgatttcccggagaaaagctgctgccctgtggtagagggtggaggaaagccccaccacccctggatgaggggggccccaagacttgcccccagggtagctaagacctcactccgagggggctgcccccctcaggcctatgacgggcaggtgcagctgcaggggaagggaggcagagcagtctcttccggcagcaggaagtggtaaccgcctatggggaaattgtggggctgagcagaaggggaaccggagctgaactctcctcccctaccaagggggcctggagggaacggcagccagctgctgaggttctgctctctggtgctgaccttccttccccctcccctctgaacttcccaccccagctctcaaggctccctggggctccctgggcctctctgggggctgacttgggaagggaggaccccatcggatgtctgggggaaggaggcaacccagggggagtccagagcctggggcagcaatggtgttcatggccactggtacagtgggccagcggccccgctgtgaatggtacagtctggcagtggtgaccagggacagccttctggaggtggtgggatggcagcctgggatgccagcttacgttggggctctcacacctgctccggctgcttggcagcggggctttgggcacaaggcagccta

SEQ ID NO: 42997 - DNA, 1411 bp, Artificial sequence
  DNA replication origin
ccgccccgcccccaggcccgccccgcgctgaccggctccgcgcattggcccgccccgtgcgctggcctgtcccgcgcattggccaagcggccgggaggacgggcccggcggccgtgcacttccggccggtggccggcccggcgcgcaccgccccttccgccgtcgcccagcgagcccagctccggtcccagccccggccgtcccggcgtcgcttcggagcgcggcggcagctgactgcgccttcacgatccgctgggacccgcgagccccgccgccgttatgaacatccgcaatgcgagggtgagcgcccggggcgggaggctgtccgcgccgcgtgggcgccgggccgggtggctgccgcgcatgctcccgagggccccggccgagcccggcccggtggccctgagtgtgcctgcggccgctggacctatggggctggcccagcccgccgaagaggccggggcgcggggccggggctgcgattccctcctgtttgcgtgatgtcgggcctccgttgggtgggctccggggacctccggggcgcccactcctgttcctgtgctccgggcgttgtgcaaagtcagatcgtcacagtgcctgcccagccccgagggagcggggccgagcagaccgacggggagcaggcttctcacccgtggtcaccgccgccttagactgagcgcgttccactgccctccttccctgcagccagaggacctaatgaacatgcagcactgcaacctcctctgcctgcccgagaactaccagatgaaatactacttctaccatggcctttcctggccccaggtgggcagcttctgaatttgggcatgggggaaagcaggccgaggaaaatcccatctggccatcttggagggagtggacaagtctgtcagagcccagggggctgtatggtcggtggcgtcctgggtgttttcagctggcagacaggggcaaaggaaaagaaggcgcccgaagggagcagagaataggggcaggatccccactttgcgtcttctttctgggtatgggcagggcacagtgtggcgagggggagaccaagccactcagcccggaggtcatgagccatcacacaactcgccactcgtccagtttgtgtccctctaaagggctcttctagctccgacaagaagttttctcactctgttttcctgtcaccagctctcttacattgctgaggacgagaatgggaagattgtggggtatgtcctggccaaaatgtgagtcaccaaggaggaagacagaagctacacgtgtctggtggatgcctctgtgggctttaaaaaaaatgaataggcttcttcttttcagtacagttgaaagtttatagaaaaattgaacagaaaggacatggagttcttatagcacccctcagcatcccctccctgcc

SEQ ID NO: 42998 - DNA, 1341 bp, Artificial sequence
  DNA replication origin
gcggggctcgcgggtcccagcggatcgtgaaggcgcagtcagctgccgccgcgctccgaagcgacgccgggacggccggggctgggaccggagctgggctcgctgggcgacggcggaaggggcggtgcgcgccgggccggccaccggccggaagtgcacggccgccgggcccgtcctcccggccgcttggccaatgcgcgggacaggccagcgcacggggcgggccaatgcgcggagccggtcagcgcggggcgggcctgggggcggggcgggcgctgccccggagctggagccggcccctccctcggcgcgacagcccccctcccgcgagcccacagacgcgcgcacagccgcaggtggagcggactcagcctttattccgcgcctcggcaggcgggggtgggggcgggggagggggcgggggcggggcggctcagcagggcgcccagcatctcctcgcacatggctaggcaccgcggcacgtggaagcagcctgcgggtagaggcgggcaggtagtgagggccgggggcagccgagaggcgcaacccctgcggccccgccctctcccccactcacctttgaaaggacctcccttgatggagagggccaccttgccctctcggctcaggtagccaaaccattccccgtactcgggatcgcgaaactggaataacagagacagtgacagctagcgcctgcaggacccgcccagatgccactgcatcgctaccaggggtcagagcctgggttgaccccaggtgacgtggctccagaaccagcgatcttaaccgcgacactgcgtcctccacaaagatgaaagcaggggtgggcgcagcaggcaggctacaactatataaccgactgggcaaggggatgagacactgctagatggaatgaaagaactctgccctggggtgtagaaacgttgtctatcgggccgggagctgtggcttgcgcctgtaatcccagcactttcggaggccgaggcgggcggatcacctgaggtcaggagttcaagatcagcctggacaacatggtgaaacctcatctctactaaaaatacaaaattagccggacgtggtggcacgcacttgtaatcccagcagtatactcgggaggctgaggcgggagaatagcttgaacacaggaggcggaggttgcagtgagctgagatcacgccattgcgctccagcctgggtgacagagcgagactccatctcaaacaaacaaacaaacgaacaaacaaacaaacaaaaaagttctctattgtgattgtagtcgtggttacgttgattcaaagaaacaaagaacccggccgggtgcaaaggctcacacctgta

SEQ ID NO: 42999 - DNA, 946 bp, Artificial sequence
  DNA replication origin
aatggagacgcagccaggtctggaaagttgcggaggggagtttcctgctgagatgcctgcccctgctctcccctcagctggagtgggccatgaagctctggtggccacacagtgaagccatgattgccttcctcatgggttacagtgacagtggggaccctgtgctgctgcgcctcttctaccaagtggctgagtacaccttccgccaggtgagagctgcctccttgtcccctctagaggctgaatgggggaatggggggagtctggcccggctgcgctcttgccccctcgctgagcacagtcgctcagctggtctgagagtttccggagccccagtgctgttcgttcagtcaacgaagaagcctctgccctcctagagctcgaattttggtggtgggggcgggaggagcagagtgtaagcaagcagacctaggtggtggtgagagtgacagctgtgggaataataccactggagagggttgtgggggggctctttcctatggggtggcagcagggaagcactgagcaggggccgagtcaatcaggggtgtgtctgagggactgggagtctgggcagggtggggcatgtggcacagcaggggggcctggcagcccgggaggataaaggcagagtgggcaagggacggactccagctgcctggtctgattccattgttacctgggtcctggggcttggaggggagggtgttatgggggaagtctgtagggaacagggcagaagctgggacagcagaggaagctgtagctgtcatcccagccagtgagggctggcccaggtgggagctggtggggacagagggttcacagtctggtggagcagcagtgggattcctgagtctccagttcagacggagagatctggactcaccatgaatgttttcagtatcacaagaatgtagatgctgcctggcacagtggctcatgt

SEQ ID NO: 43000 - DNA, 2058 bp, Artificial sequence
  DNA replication origin
ccccaccctgcgaccctgccatggccacctgatgcattcccactcactacgcaagtcccctcccatggacccatctgtgggccaagtccccttcacctctgaacgctcccctacccccacaggggcgcagacggagagggccctatccacgccctgcccccaactgggaaaaggcccttccctcctccctgggctccctgtgctgccagaccctgaccccacagcctggaaggggctgcacccccagactgggagcagagtggggcggatctgactggcccctactggacgctgggtgccaggccccaagtaggccctggatgaaggtgtctctgggttcaggagaggaattggctctcccaccccagggccgtgtccagggggatggcacaggatgtagcctcagcctgggcctccccttgcctcctgcacccccagacggaagcggtggagatgatggatcagatcgtccactgggtgcaggaggacgcgtcgggactgggccggccccagctccagggggccccggctgcggagcccatggcggtgcccatgatgctactgaacctggtggagcagctcggggaggcagatgaggagctggcgggcaaatacgcagagctgggggactggtgcgcccggaggattctgcagcacgtgcaggtgggggatgcctggggagctggggtggtgggaggccttccactcccccactcccctgggcaccctggggctcgacacacctggagagacagagattcggggatgtccccacctggggaaggtggagggcctgagggctggagggaggatgcggagccccaggcaagccctgacagaaggagacccctcctgccccacccaagtcccttccaggcctctgggccgtgaaacccgccctgtctgtccccattcaatgtttcaccctcccctgctggagaggatcaggccagaagtgaggattacatcttcctaggcccgggctggacgcggtggctcgtgcctgtaatcccagcagtttgggaggctgaggcgggcggatcacctgaggtcaggagttggagaccagcctggccaatatagtgaaaccccgtctctactaaaaatacaaaaattagctgggcatggtggtgcatgcctgtaatcccagcctctagggaggctgaggcaggagaatcgcatgaacccaggaggtggagattgtagtgagtcgagattgcggccactgcactttagcctgggtgacagagcaagactctgtctaaaaaaaaaaaaaaaaaaaaaaaacaacaacttgctaggcccaagggagtgaatcagcccctccttaaatgcccctctgagcctggcccacccaagccagcaggtccaggggcttgggtaagagggagggaggaagggctttccggagctgggtctttctagttgggtggctgggtgggtgaaagggctggaggcaacattcccttctgctccttcccggtagagggatggacaagctgtgctggagaatgtgtcagagggtggcaaggaacttcctggctgcctggggagacagcagaacccaggtgaggggcggggtgggctgggggccacccaggaggaggggagcgctgagccttgtgttctgggcttcagatatgggagtgcctggcgggggcgccttgaggaggcagaggagcgaggatgggcttcccaaggctgggggtttctgcagaggagcaggcttccagggccagggagctcagagcctcgctcattgttagggagggagcagagaggtgccaggggcttttgctccctctgttccctccctcaaccccaccccccgccccccgcccttccgtactccacccctcaccaggccacacgctggaagccggctggtttctgctccgtcattgcattcggaaaggcgaccccgaacttcgagcccacgtgattgacaagttcctattgttgcccttccactccggatgggaccctgaccacggaggcctcttttacttccaggatgctgataacttctgccccacccaggtgggagagcgcccaggg

SEQ ID NO: 43001 - DNA, 1226 bp, Artificial sequence
  DNA replication origin
gtagtagagactgccgtgtagaacaggctggctggggttagcgcctgggaaacaggcagggcccctcggccagggcttagcctacagtggagcacggtaggaggtggacggggtctctaggacaggctttgggggcctccgcccgggctgcccgcttctggccagccttcctagtaagtagtgtttctctcgaccctggagcaggcaccggcgagcccatggacacctccgaggcagcagcaaccgtgactcaggcggagctggggcacctgtcggccgagggtcaggagggccaggccaccaccatacccattgtgctgacacagcaggagctggctgccctggtgcagcagcagcagctgcaggaggcccaggcccagcagcagcatcaccacctccccactgaggccctggcccctgccgacagtctcaacgacccagccattgagagcaattgcctcaatgagctggccggcacggtccccagcactgtggcgctgctgccctcaacggccactgagagtaagcgactgagggcgaattggtgctggggtggtgggggcacccagggaggtgagggcaggacgggaggctcggtctcacttgggagccaggtttcccgagtctttcccgctgacaccttctttcttcctaggcctggctccatccaacacatttgtggccccccagccggttgtggtggccagcccagccaagctgcaggctgcagctaccctgaccgaagtggccaatggcatcgagtccctgggtgtggtgagtcgggtgtgttggggctcctgagtccgtggcctggggggcagcactgcctctaggtgctgagggcctgatctcgtcgcaccgattctgtcttgcagaagccagacctgccgcccccacccagcaaagcccccatgaagaaggaaaaccagtggtttgatgtgggagtcattaagggcaccaatgtaatggtgacacactatttcctgccaccagatgatgctgtcccatcagacgtaagtgtccccaggtgctgatgtcctcaggtgggtgggtcttggctccaccaccctgagcggggcttacaggaaactcctccatctttgggccaagctgagtagccaggaagcctgaggaaggtgggcagagaccatcccccctgaagcagtagaaaaggagagctttggttccttcccgccagtaccgggccacagtcagcctcgccacgt

SEQ ID NO: 43002 - DNA, 996 bp, Artificial sequence
  DNA replication origin
tgccaccctcgagggaaatgggctcctcttcccaggctgtctccgcggcctattgctcccccgagcggcccggcttccccagggttgcaccggcactcacccatgacggcctgctgcgcggcctggagcaccgcctggatggccagggcctgggcttcctccgtggctgcggcctgggcagctgcttctgcagcagccgtcactgccagctcctcgggggtgagccccgttaccatgagggtggtggtgccagcttgggcctcggccattagctcttggggaagtgataactggtctacttcggactgtgtgggtgggggtggctggaccaccacagtggccaccaccgcagagccggcagactcctggcccgaagatggctcccctgtgctgctcagatccacggcggccgggagctcaggggtctgggaggctgacaggacctcggcggactcccccatcagggctgtggaagccgactgcagaagctgccgtggcggcagctgctggcgaggacctggcgacacctggagttcctctgggggctgcaggatgtcaacagcagagaagggcatgtcagaagtttctgtgttggctatggtcactgttattttggccgggatggggacttcagtagtcagagcccttggggcagtctcagtcattgatgagatcttctagaaagggagagaagcccctgtcagaggggaggagaggggccagagccaggcagcagggctgagaagcaagccagccctcacctttccttgtgggcctaagttttcattcttgatgggccagctccagcccatgttaaatagggaggggacagtggttctctgaccagcatgaggagaaaggcccttgagacccccggtcaggtttaacccgtcctcagtcaccctggcctggacaaatgggcactcagacccccgccatgtcttatacaggctgcggtgaagtgacacgcgatgagaaccagtcccagaaataaaa

SEQ ID NO: 43003 - DNA, 1363 bp, Artificial sequence
  DNA replication origin
ggtgggttggagcagacttgggtcacggtggccgaggggcacagcagtgcctccagggctgtcacagtcactgtggtgctgggcgagccaccctggaggctctcgcacacaggtgccatgcggggctccccagcacccacgctggaacgggtcatggcagcggtgctgaccgcatggctgtggcgccccgcaggaaggtccttaatgcttgggctgctcagcctgactttgctgctcagaggggccaactgcacaaaagcagggctgcggcccccgggctcccgtgccatgctcggcccaaggagtgggccggccgagcacggggccccggtggccatcacagtcatggtggtgctggtcgcgctggtctggcgggtttggcactgggacttagagccctgggctgcctccagcgccccagtggccacactgatccggatcacggcaggggtgccagctgcacaggcccgacgggcatctcgctggtggttggcgccgacgctcgacatggctgtagtggcagtgttggtggtgcccgtctcgtgggtctcgcagggtgggtttgagcagccatgctgcccggccatgttggaggtggcggtggtggcggtgttggtggtgcccgtctcgtgggtctcgcagggcgggttcgaacagactcggaccacgctaccattctgctggcccacagtcgaggtcacaagagaagcagctgcctcctgtctgtcacagacgaactgcacttgggtgggctgggggtgtcccccaaggttagccacaacagtagtggtggccgtgttggtggtgccagtctcgtgggtctcacagggtgggttggagcacaccaaggtgacagtgccaggctgcacatcaccctggcctgagtcggcgatggtaactgtggcggtgggctgttctgtagtcggggaggccagaatggacacagggaggtcatgcacaggctgggcctccaccccactaggtgccgtgatcagagttacctgggtgggctgggacacgggctggggagacacacgaggaggagagttagtgctgcagctggctgtctgcctgtccctcccactgtcctgcactgtcaccacacaggctgggaccactgaccacttctcaacggccctggcagacgtaagacccactcacccctgcccccaagacactgacttgctcagaggccagggaagaggcaccactttgcctcaaaggcaactgggatgaggaagaggctgtgaggacagggcaaggggaaggcaggaggctggctgaagtcaagtcctttgtcagagaatggaaatccccctcaatgctcaaaggccaacaacaaacgtttcaccgttttccttaa

SEQ ID NO: 43004 - DNA, 860 bp, Artificial sequence
  DNA replication origin
gtgtgcagtggaagaactgacctaggaggaagagaataggggggaacggggagctagtctcaagatggcggctcccacggcggcaggcgcagcctgagcagcagaggcggactaaggggagaggcgcgagacttcacaagccgtacggcgcgagcccccaaacggccctcgagagctcgagctggttccaccggcctccggcccgcctccattcgttaggtgtgtcgaggctgtttcgggagcggcggctgcactaaggcgctgggcggggaagcgggacggtctcaagatggcggctcccacaattgtggtctgagcgccggcggggctgcgacgaccgcggcgcttgtggctcctttccacccgccccggaagccggccagtgctggggacttgggggtgtgggaaccgggccggggctccgccatttccggcgggggagggctacgactgaggaagggaggagagagaggcggctcaagatggcggctcccagggcctcccgcccgagcttgtaagcgggagcgcccggacaagtagtcggggcgacgggactcagcggcctccagcttcttgagcctaggcgctcgacagtttcgggcggctcttgcggagacggggtgagcgagaagaaagggaagagccaaagggaaggagggcagttaagatggcggcctccatggagtcgtctaccgctgtgtgagaaaccgcttctccgtgagagctgccttagacgaaagggggtgtgtgaaaggaattgaggggctcccttcccgcttgttgacttctccccaccgcaccctttcccggaactatggcttcggccgtgtcgcccgccaacttgccagcggtgcttctgc

SEQ ID NO: 43005 - DNA, 1640 bp, Artificial sequence
  DNA replication origin
tccgcccgcgccgcagcaaaatgagccgggccgcgcgccccagaccgccgcgcgctcggccgcccccactgccgagaggcccgcagtcgggccggtggcgcacgagccgggcgggcgaccgcgggaggcgtccgcgtcatctcgcgtcacctcgccccgcccgcttcccaggcttcgagtcccgccctgcgcgcaggcgcaccggcgctgctcggatcctcccttttcggagatttgaatttcccccagcgaggcgagtgaggcgaaatacccgtatggtgatagctggccttttcgcgccaatactgtaagtgctcaccgcagccctgggaggtgggtcccggcctcgcccccacgtttcgcctcctctaggaggccgcccgggcgcggcggcggcggcggcggcggcggcatccgccctgccacgcgcaggccgcagcgcggggacccaagctgctgcccgggagcggcagtcgccagtagaaatggacagaccggtcctgtcagagcctgtggcttttgttgtaaacgtctagaagttcagttaaattacaagatctaccagatctaccggcgggcagaattattactttgaagttactgaagttatgcgtcctgctggaagaccttgtaatttaatgcgttagtaaagaagcacacgtcaccctctcacacattttcaacaatatttttaaagtcgcctctcaacatattacatgtattttgtaatcgtctgtgttttagttcatgcagttggaagtatccatttgagaagggacaaagagaagaattcttgcctgtctgtgccaccacctgctctttgtgaccttggctagttacctcacatatgtccccaagtcccccacccatggtaaataagaaaactaaggcctgatgcgttggctcatgcctgtaatcccaacactttggaaggctgaggtgggaggattgcttgagcctagccggggcaacatagcgagacccggaggcatggtggcacacgcctgtggtcccaggtacttggaacgctgaggtgggaggatggcttgagccagggagttcagggctgcagtgagctgagatcgcgccactgctccagcctgggcgacagagcaagaccctgtctcaaaaacacacacacacacacacacacacacaaaagcagctgctggtttccaagggccttgcctggaatcagtccagaagctaaattaatgttaattgatattcctttatccacagaaagacagcaagaaaggtcatgcggagcgggggacataactaaccataaatgctaaaggcctggaggtgacagtgcctgctgtttaaacgcgtgcgggagagtctggggcctttagccaggagattgtcaggcttcccagggcttccctgaaagaccccagacccaggggccagtgctgttgaggtgttggctttcccatgccaggcgctgggggaagctgtgacgagatttgagtgtcacataataaggatcatggcaattcaaaggtacagggaagctaggctataaggtaaccagctcggttttcctgggggtcttggacaggtgctttgattacatggtcactgtcagcccgtacccccggtcagatagactgaacccctgcagccggaaagag

SEQ ID NO: 43006 - DNA, 955 bp, Artificial sequence
  DNA replication origin
cccggcagcgtcctccgctggacacgaaggagccgctgggtggttccagctcgtggccatcgggctgccccggctaaccgactgcagcgggtgagctctgccaactgagacctcacagagcacaggctcgcgagcaaaacaaacattgccattattttcagcccgtacatcttggggtggcttggtacctagcaagagataactggagcagattcatatgtgggtctatgtggtggctgccacatggccgtgtacatataaaacagtcattgggctgtacgagtacggtttgtgtacttttctacctttaacttatacctccctaacaaagtctttcagaaaagcctaactcctgaggctctggtgtgggcagctgggtgggcgctggaactagtcccacacgctgaggtgggaagctcatggtgaaagggaatcccaagtctgcttggccatctaagtttacggtgcctgtgagaaaaatcagaaggccaaaacctcaggagagagagcatgacggaggcgctgccgtttgggaatggacatgatagagccgtgagaatgaggaagatcaccgtcgggaatgagtgcaggcagctaagaaggcgcagaggcgtgtctggagggactcacaccttgtagaggctgggtagagagagcccacgcacgctgagaaagaacacagacttcagcgtcacagaggtcacaagagacaagcggttggtgggggagtaggcaccggcgagagaaagtccaagaggactggatggatttgacaacacggagatccctggtgttctggatgaacgctgattggatggagtggcaggggtagaagcagaggaagagggactgcacagggaatgggcaagtgagaaaacagacaaggattctgaaaagtttagctacaaagaggaacagagaattagggttgtggttggagggggtgttgggtcaa

SEQ ID NO: 43007 - DNA, 1666 bp, Artificial sequence
  DNA replication origin
aattgaccccaccgtgggccaaatcctgagccgggtgctgctggggagctggaagtgcaggcctggcctgctggcaggacccactcacacaggctgaaagccctaggccccgcgcccggctccagccaggtgtcaggagtgctttgggtcctgggaagcgtgccgggccaggtgagcctacctggcagtggagacggtcctccagggagccgttgggcaggaagccgtacaccaggcagtagaagccgttctgagcacagtagccagcaaagtccacaatgtttgggtgacgaaacctgtttgaaaaaggggagcactttccatcaggccagactgggtgggcagccctggctggggcctcagctcgcccgggcctgccaggcctcaggtgcccaagggagccaggtcctgtggtgtgcggtctgaagccccacgggacctggtgtggctccccctctggcctcacctggacagctgctccacctcggtcaggaagctctgcttcactgcagtccactccaggtcagcgttctgcagcccccagggtgcggtgggggaaggggcagggaagacgggcagcgtgaggctctcgaagcgaaggccttcgggccaccagtgccacctacccgaggcccagaaccaccaaggggccagggaccctacgccagaatgagggctgaaggagttgtgtggggaagcgagggggaaaggctggagaagtggtgagggttatctgatggccttccagggtccctgccagggtgcgacactcacctccttcagcctcttcacagcatacaccgtgttcctcatcaccgcccggtacacgcacccaaagccaccctccccgatcttgagctcctccgagaagttgtgggtgccccgggaaatctcacagaggggccagcaaaacggaaaggggcgggctccctgcaggagggacactgagctctctgggcctggctgtgggaagagagcctggatcaggtggggtccctgtctcttcccttctgcccaaggctccaggctctccccaccacagctgcctcccagctgacccagcttggctgactggggctctgcgctacatcaaaggctgaattccttcctccttgtctcgaatcttccctggggggcaggggacacctaccttggtagaagaaggggctggagatggcggtggaggccacagggaagcagggcttgggaccaggccgagctcaggccctgaatgggtctgggagcctggaaaagcttcataaagacaccagtgagaggcaggcagagaccagcagcagggtctacagccgtggccgtggtcaaggtgggctcttctttgggtccaccgagcctaacaaccgggccctcttacctggggagaggaaggtggaggctgaggatggcaacttccgggggctccaggcctcggcctcggcgggtgcagggatgctgctgggcctcggggcagtggtgcctggggacggaagcggggcgggagggtgccctgggacgccaaggaaggaaaggaaggttgaggcccgggtgggggagccccgtggggcccgccggcctcccagccgtggggtgcccggagtcccgcgctcacaggctgtgatgatgtcccgcgcacggagcagctgcaggtgcgtgaggatgtgcacgaggt

SEQ ID NO: 43008 - DNA, 1370 bp, Artificial sequence
  DNA replication origin
ctttcattataagacagaagtccccctccagctcacatgacagcatggtgctgcgtttcctcattggatctggctgtccctggacacaggtagctgccttcaggcctgccacgagcggccaagggaagcctcctccatatgctggcctcgctggcccctcagcttcttccaagccagtgctctccaggcacactgctccagcgtgtgacgggaagggcctggcatgagtcagcctgcagcacaacctccctgctccagacccgtatggtaggggcaccccctaggtctggatgtgctgtggtgcttttggacacccccacccccgcaggctgtggctcctcctgtgtctcattctggccaggaccctcacgtgccctctgttgactgctaacgtggttctctgaccaggcaagggcaggctgaggggtttgcccaaagggggcccccttgttactggcttccttggctctcaggagcagcctcaccaggttggtaaggggctggaggagacaactgctcaaaggagtccagcttcacatgcacatgctagaaggtaccctcggaaggcctggccttcaaaggtagatcccagggttgaaaagtcaacttgtatgcattgagcatctcgtatgccagccctgttccgtgagctgatgggcctttgtgtgtaagtaggaccaagtgcccccgtggaggttagcatgggtgtgcagtcatttcagatacttgagttggtacatctcagtaaagtctgtcccgtgagaagccatgggtttcatggtatggttggcatcttccttgggagtggccacagtggtggtggcttcaggaaagagactccaacaggggccagctgtgggccttgggcacttctcgtttctaggaaaagtcctaagtctgtagggctaggggtggggaaccccttcgctgtcaggatcaagagggcaaggggaactgtcgctggaggagacatccagctggagaaacaaaagagtaagtctgcgttgctgcttgtggggtcttccccatctcagggcggggaccgggggtggcggtccagacaagtaatcaaggacgatgcccaggaggggacaggtacggggtggcaggagctctgccggcgggctcaggaagccttcaccacagctgcctgagctcacccttgccaaatgagggctggggcagcagcaacgcatacactcacggctgtggcgggcagcgttctcggcatatttcaggacacctaaggagactgaatggctcaaggctgctgccgtgtgcagggggctagacgtggggcgggcaggcagggctcctggtaacagccctgcaggccgcagtggagagcagggttccggcagggccgccca

SEQ ID NO: 43009 - DNA, 1401 bp, Artificial sequence
  DNA replication origin
tgctgttaaattctacactcataaaggaggtatgttttaaaagaggggcaaatatgtgggtgctatttagactctcattgatttgttccatgttttcagataactacacacccctccgcccccgccaaagtaactcaatctccacatatttgcctttatatgtaccttctaactcatgactatggctttgattatctcataaacaatattgttcctgttagccatggagaagctaaggagccaacagcagagcaggctgcatgttcttctgtccctcttataagacaaaaccttagagcaatgtcccactgcagaatttatttgttaattcactcaataaattaaaatatgcatgattctaggcactggggatatattgaggaagaggcaaaaaaaaaaatctctgtcctcatgggactcagattctataggggtggggagagggagggaggggaagggagtgggagagcacaaacaaaaccaagcagtaacacagcttgtggcagatggtgacaagtcctatgctaggcagggggaactggtggggcagaggcaggctgcctgacttacagacatgggtgtgctcggggaaggccacattgggaaggtgacacttgagcagacatgtgtgatacctgggacagagggcagaggagaggtcaaggccttgaggcaggggcatacttggagggtccagggaggagccaggaggccagtgaggccgcagtgcatgagtggtgggagagtggcaagagaggtgatcctgttgggctgtgactctgagcaagcagggacccactggagggttctgaacagaagagcacaatattgcaggactaaacaaagaaccagggggcaagggcagaggcagggaagctggacacctggaccagggtgggggccatggaggcaggggaactcatgagattttgtatccatcttgcaggtggagtaacagtatttgtgaacaaatgaggtaaccagcgccaggtttctggcctgaggagcaggagttggagttgctgtttactggaaaggagaagaccagggaaagagaaggtctagggaggataaggagttcccgtgacccagtcagcctggagacataaatttgggagccatgaggctggacggaatcacttcgggagtgagggtggagaagaaaagcctgaacctgaggccttccaacatcacatgcgaaacagaaaagaccgaggaggacagacattcacacactcacctaggacttcctgaggacccacagacaccaggcactgttctaggagcttgagctacatctgtgaatcaaggagacaatcctgtcctgtggagcttctgctccagcaggggtgacagctaagataagcacagtcagtcatgtattcagctagaaagagacaa

SEQ ID NO: 43010 - DNA, 1357 bp, Artificial sequence
  DNA replication origin
aaaggagaagaccagggaaagagaaggtctagggaggataaggagttcccgtgacccagtcagcctggagacataaatttgggagccatgaggctggacggaatcacttcgggagtgagggtggagaagaaaagcctgaacctgaggccttccaacatcacatgcgaaacagaaaagaccgaggaggacagacattcacacactcacctaggacttcctgaggacccacagacaccaggcactgttctaggagcttgagctacatctgtgaatcaaggagacaatcctgtcctgtggagcttctgctccagcaggggtgacagctaagataagcacagtcagtcatgtattcagctagaaagagacaaaagctgtggtttgcactgagaaggtgcacatcagtgcagagactcaagggagggaaaggattgtctcgtatgggtattggggttaactgacgacgacagctctgggaaaagaagtgacaagcagctcccagatttaacaacatgaaggtcatcactggagacctcatggagcagcttggcagagctgtggcagcaaaggaacaactggagaaggttgaagagggtgtggagacagggactggagtcttgctggtaaaggaaaacagagatgctagacaggtggggggttgggagcagcttttgtcaaggtgggagaagtagcaacaagtttctagggcaggcgagggaggaatctctgatgggggagagtgcagtagaggactggagagatgccttagaacaggagtgagggcctgggacaggcgctccgtgacagcatgagggaggcagagcgaaggagtagacgctggcctgtagacactctcttgagcttgcttctgtgctctctgggaactaagatatcagctgcaaggaggtgtgacagctgatgaggagggtgggaggggctaggagagaccggggaactgcagtatgcaggtgggcttggcggcaagaagtttacctggggtagacatgaacttaaagggggaatcaatgaaggagtcacattcagcttcaggacggagcaggcatggggcagacatgactgaatttcatgaggctggggctttgtcgactgaatataacaaagcaagaaagtgccgaagggctgaggtagtgtgccagggagtaacgacgtctgactggcactgaagctacaaaggagaggaataaggatacgaaggaggtgaagtctgagaaaagatggagccactgatggattctaagtgcctgtgaggtcaaaggagtattggagttgggtattagaggcagtgaaaaggaaaaggatctccttttgcagatcacaaaaaagataaaatgaccagagc

SEQ ID NO: 43011 - DNA, 1211 bp, Artificial sequence
  DNA replication origin
ctgctcgcgggtgaccgtcctcggcgcggcctccctggagccgccttcgcctgacgcccctcttcctcccgccctcgacgcgcatcccggcccccggccccgcgggcgcccctgtcgccggggcttcgcctgtcggggctgcgcgcgctcctgcccttctcggggctttgggccgcggcgccgtcgcgcgcccgcggccccggcctctccctggatcgcgctctccccctccctccctcgcgcgccccctctcccgttactcggcccccccaccggcgcgcgtgcgcacttcgcctcccgtcgggagagtgcgccacaagggctcctgagctctcacccccatctctgggctttgcctccccctccttctcgcccattccatgaatttctgccccccgctacccccccgcgagcgagtaggtccaccggctcctttccccatctagcaggaacaagtaggtggggattattatccacaaaagggactagacattgtgttctgggtcccacaactcatcataaagaggtggttatagttcccatcaggagccgtgggtaggggactgtgcgtccagcagcacccgaggctcttcggcgccagaggctctaaggtgcgagcgtgtccccagggtgctcagaggttctttggagtgctgtggcctcggaatgtgagcaccctcccatcctaccctccccttcgccggcgatcttccagttacataagtggagtgggacatagtaggtaacgggctctcatcgccctggagcgctcgggatcaccggtaccagatggggcaagttcatcgcgacgctgtggctcctgttaattgtgcctgaaaggttatcctctgttcagtttggtcatgaccgaatcacccaaactgaaactcagatgacttttatatggcagtggcaatgtttctgtggttttgcactaaagacttaaggtcattatgaagagtgtaaaaggattgctgtcgcaggggagaccgtttatgacattgctaagtatggaccccgagggggaaaaagctcattctggaattgctctgtggcggttgcttctgttgcgagtgtgttcgggtgtgggttggtcacagcagaaatgggctccaccacaaaattgatattcctgactcatggtcaggcagatgtgtgcttctggttatttttccaggaacaggaatgggctctgccgagcctttcacacg

SEQ ID NO: 43012 - DNA, 1897 bp, Artificial sequence
  DNA replication origin
tcgagggcgggaggaagaggggcgtcaggcgaaggcggctccagggaggccgcgccgaggacggtcacccgcgagcaggggtgacgggccgaggggagagtcgccaccggcggcggcgggagggggagggtagagaggagggacgccatccgccagccgtgtcgtccgaccccgcgggcccctcccgcgccacgtcccgcccctgacccccgccccccggcaagggtccccgcccgcggccacggcggtcccactcacagtctctcctcctcgcctcctcctcctcctccgctcggcgcggcggcggcggcggcggccattttccggacggcttttaccacagccctctctccgagaggagggagcgcgcgcgccgccgacgccgggaccccgcacggccgacgtcgcgccccgccctcttggccggcccgcgcgctgctgcacctgcgcgcccgcgccccgccctcggcgccgctgcgagcccgcccgtcattggctgtgatggccgggctgggacggggaggacgggggaggggggagtctcagcggcgatgccgtcaattggcgagatttcctgtccatttcggccagggaaaagggggcggacccctccagctgttgattggctgctttcggccgtcgtttggggaaaagaggcggcttgggcgcggagggactggtttagtgggcggaatttgaatgttaaggattaatggacccttgcggatgctggggcaagtgaaggcctaggcttgggacgcctgtttgcgctgctctgaggggcgattgaccctctgtccacagatgcaccgagtgcgctgcaataagcgtttcattgcacccacattttctcaatatcactatcttcggcagaagcagcaaagttgcccaccctggagcctgacgttgccccagctgaggggccttggtttcagaggcctactcaatgcattatttcatccgagcctgcccagtgctcacactctcatagaggcggggaataaactgacaacaaatcgcaaccctggctttcgcagaactctggcgggggaagagagtgcatgccaaggcctcgtgacacctgtcactgttggatcagatggtttggtggaggtgtgaataaggggcaatgttagctctgcctggaagatatgatttgggagctgagatccagcaatttttcactttcctagaagagttgatttggagctgagatccagcaattgtgttttgggaaaataagagtatgagaaaactgttagctaaccaggtgttcaggacaggagtgtttgttaaggggaccttaccctgatgccagtcattatccaatccattcaatgatccttctgttagttctatgcttagcaagaaaacctgattctgatttggctgcttgcccccattcatttattgactacctgctatgtgccaggcactcttccaggctctggatgcacggtactgaacagacagcaaactaacattcttgccgggaagattcatactagcatacaaataagtataatatatcatttcacatagtgataagggctttgagaaagataaactaagtgaagggggtgctatttagatatctgctggttttcaccctcattttactccctcatatgaatatctggggaaagaacattccaggcaagttcaaaggacatgaggagagactatgcctggcatgttggggactaacgaggaagtcagtgttgctggagagtggtagggaatgtgattggaaaggcagctggggccactatgagaactgggagttcattcttttttggggggggtggggatggggtctcattctgtcacccaggctgcagtgcagtggcgcaatcttggctcactgcaacgtccaccctgagctcaagcgatcctc

SEQ ID NO: 43013 - DNA, 1269 bp, Artificial sequence
  DNA replication origin
tccggataggaggcctcgctgagagcaacatcaacattattggttcccactgtggggtatctgttggtaagggttctaaatgccatcatcttggtagccttcctccttcacagagaaagattagcatgtgattggttaaaccacgaatttccttatggttccatgaagtttgattattcaagcctttttcttgaaaaagccatattgtactttaaaagtgtcagactctcagggcaacttttgaagtgcatctctcggtggtactgttgtttcagacagtgagaaacagttgcttatcccgagtgccccttgtgtgttgagctgcgtgcaggttatggacaggactggcagagtcatggagccttttctgccctcgctgtggttgcagtctaactgagggtgaacagcatcacagaggacgaggagcattctggctggctgcacagcctgctcaggtgggaggggggctgggaccaccatcaccaccttcctgcctggggcagcgagaaccctggagcgtgacacgaggcaggaactcttacaaacacacccttctcagagtagtagtcacctggcaggtgggctagaaggaaaccacaggaaacgggaagccagagaggggattgaaacaaggtgtgcaaggtggtgggggagaaaaccaggggggtggggggggacctgagagtgaagaaagaggtgagtgtgcctaacagatggagcactctgcaatggcgtgaagagcaaaacacacgagtctccgggattcctcacttgggaaacgtcagagagtcattttcgtgaatgacagaaatgacatgggaaagatgagccagctggcgtgcctgtggcaggcagatgggcttactagatgtggctgcacacacttgcttctagaatgccagagatgcacgctggaaagccatctcagggactccctgggagaatgaggctggacgagatggctctagatggagctagagtcacggctgtctgggtgaagctggaggcacaggtggtggccagagagaggaggcgcggcagtgttgcaggggcagaggggcctaggaaagggtccttgagcccacctgtggctgtgctcagtttcagttttgaaatagtcacatggagaaagtgactctaggttccatccaaagaagaactggaaggctgggcgcagtggctcatgcctgtaatcccagcacttggtgaaaccccatctctactgaaaatagaaaaattagccaggtgtggtggcacgcacctgtattc

SEQ ID NO: 43014 - DNA, 2326 bp, Artificial sequence
  DNA replication origin
aaggggccaggagctgtcaccaagggcccccgcattgcccagaggcggcgcgggccaacaggaaaagcactcaccgcccacggaacctctgtgacaaactcagagccacggagagcgtcatcagcaagtcacttgccagtcccagtgggaaggatggggcacgtctccagggaaacgagacaccaaggtcttcctggggccccagtggaaagctccttccaggacccacctggccctccacatcccaccctccaggccagggaccggagcccagtatccggcaacctgacacatcacggagaaaaggagctgctctgccttcaccatgacgacgcggcacaccccctccctgccccggcccctccccttcagggctgcatgcggggaggagaggcctcccctgtctgcagagagaggctgccccacctggggcagagaggggacaggggcaggaatgagcccctgggaggggggcattggaggtggggggcacatcctgccacccgggctggcgtggggcactcatgccatgcagaccagaacgggcttcccaccggctcctggggatgttggaccggggctccccgaccagggctgggaaaggcttccatgaagagccagagagcacacggcgcagaccctgcggggcacacggggtctcggtggcagagtctcccttcttggggttctctgtgatgggttttgcaaccctttcaggatgtcaaagcacgccccgccctcagaaatgcaggccccggccagtgtcagccccaggaggtggcctgctgctcccgctgacaccaaggacatgttcctgaggcggcccgctcgggatctccagcagccgacgcaggtctacacgtgcaagggtgcttctgactcgcagcactcaggaacagcctccaccctgagcgtggcgccctctccagcacgcgccagggtggacctgtgagaccaataaaaaccacagcggaggcgaggcgagtcacttaggagaccaggccatgaagagactgtggccgggtctggggcgccctctcctgctggttcgactggattgcaggtccgggggaagcccagcagccctggggaggaggcccggtggggaggaactgaggcctcctgccacagcctccagagggagagtcatcacgagggctccccacccagtcagataggatggctgggccccagtggacacctgaccgcagcctgagagggaccctgagccacagtcctggctccccgagagccctcccagagcctgtccctcagaacccttgggggggtgacacgagtgctgggggggtgagacgagtgctaggtggggaaggaccgaaacgtgaagtcgtctgttacccagtagtcggaactggtgcccagcgtccagggggcaagacacggcgtgagccagaaggaaacaaaccgacaagaacccccagaagccatcaggaaagcctggagattctgatgacacgaaaactaaaatcccctctgtgaccaagcacaacccgcaaaccacacagtcaagagacaagtgataataaggggagaaaatagtagcaagaggtgactaagggctcgcgtcagtcacacacacacagagccggacacacggacaaggcaaagtgcaaggacaagagagcaaaagggggcggaggagaggaagggagagggaaggaagcgtcttctccaccgggatgcaattccttgggagcccgtctgaccccagggcaaagagatgctgggtcgccagagccgccgcggagaagtcccgccgggcctcagagcccagcaaagaggaaccagggcggacgggccaaacccagcggccggctcccgggggggtgggtggtggcgctgcggggagtcgcctgagcagcatcaccagcagctgggaaccctcccggtgcgggaaggttggcgggtaaggcggggcttccccggaaacactgggctggacccagcggtcccatgggtgctggaaccagccctgcgggtgttcccaggcaccctcccgcgggaagaccggctggagggatggctcctgttggcacccacgtcgagggaagccaccgccttctctgcggggctcgcctttcctacctcccccaggagacagtcaggccaggaagcgccccagcccacgaccgcccgcagcagagcaggattccctccccggcggccgccgctgtcaagggacggggaagactttgttaccccaccgcgcgccaccgcggaatggtgcacagacacctccagacgccacttcccccaagacggccgcccgccccgctctgcccacctctccctggacgctgccggg

SEQ ID NO: 43015 - DNA, 1017 bp, Artificial sequence
  DNA replication origin
tccctccctgcagcctggggacgatcggcaggtttgggggaccggtgcccttggttcacctagcccagccctagggcggtggccctgccaggcatggggcttgagaggggatgtgatggagcagacacagggagggggcaggagaccctgggtgactcgggacaggagggagtgccccagaggttcagaatcctgggcacacagtgggctgagcggacaagtcgcagcctcagggggacctcccgtcctcccaactggcactgcatctttctgggcctggctctgctgcctcacagccccgttcagctggtggcttttagaggcttccagagtgtgcttggcccctttacctctatgccattgggcccagggggagcagtagagtggctgcggctgggggtgggacttcccctttctgtgtcttgcttgccccgtgtctcccagtgagtggccgccctgagcctggggccagcagcccagccccagtgagaaataaaagtagccatcctgcctgaactgccgctgccttttctactttgccctctcaacaggggtcaaggagggtacgcgtggtgttgaggtctcagaaggtctgggtttgacgtgtgccatggctgcaggctacggcctggtcgtgtcagacgctgtggagctgagggaggatgtggcgagaaagctgagcgttgcccccgagagccttgcttcctggcccttgtctgcagatgtctgaggtggtggtgtccttgtcaggggtttgatcgagggccaaagcctttggcccagggagcaggcagctttgggtgctgcagttgggatgtcccgatagcatgcaggcagcaccaggagccaggacgacttgggatgttatgtgtttgggggcaatctttacagtgggagacacataggttggtgtgggaatccacggcaggggtaccaatgaggggatattcagcagggggcccagggtacctgggattggcaccttgaatgcatccacctcctgccacctgttaacta

SEQ ID NO: 43016 - DNA, 1061 bp, Artificial sequence
  DNA replication origin
ctggcctgggttggggaggtgctggcagctctttaggaagagagaactgtcaccccagaactggcttagggacaggagaggagagcaggacaccagcgggaggaagggggctgggacctgggactgaggacccctcttgcctcaggcaacaacatgctgctggtgggggttcatggcccaaggaccccctgcgaggagatcctggtgaagcacgtgggcagccggctctacagcgtgtcctacctgctcaaggacaagggggagtacacactggtggtcaaatggggggacgagcacatcccaggcagcccctaccgcgttgtggtgccctgagtctggggcccgtgccagccggcagcccccaagcctgccccgctacccaagcagccccgccctcttcccctcaaccccggcccaggccgccctggccgcccgcctgtcactgcagccgcccctgccctgtgccgtgctgcgctcacctgcctccccagccagccgctgacctctcggctttcacttgggcagagggagccatttggtggcgctgcttgtcttctttggttctgggaggggtgagggatgggggtcctgtacacaaccacccactagttctcttctccagccaagaggaataaagttttgcttccattctcctttgcgtggctgtagctttgttggggttgggggaccagtcaaggccaacctgacaggggtgccaatgagcagatcaaagcatgggctgagcacaggtcacctccctccagggctcctgcttcaccccaccctgactccagaaggcaccatctatctttgcttcctctgcctccctgagttcaagccaacgtaaggagaggaacatgtagcaacctggaatggagcccaggcagcaaggaggcaaagagctgggcaggagagcccattactgggtagggtggtgtcaggaaggctccctggtggaggtggccagataatcaacagcaggcccggccgggtgtggtggctcacgcctgtaatcccagcacttcgggaggccgaggcaggcagatcacaaggtcaggaga

SEQ ID NO: 43017 - DNA, 2307 bp, Artificial sequence
  DNA replication origin
agtgtgggtattggacccagggctggcacagatagccctgcctggcactcactcttcactttgaggtcacagggccacccaggctgttcgtgggaggtgggaggcccaaaggctgatgagccggtcttacactctttccctgcccaggtgactacgaagtctcagtcaagttcaacgaggaacacattcccgacagccccttcgtggtgcctgtggcttctccgtctggcgacgcccgccgcctcactgtttctagccttcaggtgaggcaccgagagaaaccgcccacctggggctcctgggcccggacagaccagagccaccgcagagaccaggccttggccctgtgttcagtgacccccctggcccagctctgggttccaggcctctgctctggccgggtgcagcccacgcttggggtcggcaggaaatatcctgcccaccacgtggagtttttctcgtgtctcaggtctaaaggctttgaacagaagcctgtgccccttgagcaccagggctgcggtttaaagagggacagcctgccaaggctgggtgctgcccacagggtggggcagccctcccttcctgccacctgggtgtgtgcgacggcagagtgtgggggcaggggcggggatgtgcgcctgtggcttgctgccccttgcaaatcagtggctctccctctttaaaccaagttggacgccagatgggtaagtgcgacccgcgggcctcttgctcctggggcctttccgtcctcccttgccctggctcaagcacccccatctaaccatgtctgctgtgcttccaggagtcagggctaaaggtcaaccagccagcctcttttgcagtcagcctgaacggggccaagggggcgatcgatgccaaggtgcacagcccctcaggagccctggaggagtgctatgtcacagaaattgaccaaggtgaggccctgtccctgcccggccgccctgccctgctggctggaagcaggctgagagtacaaaaggaaggtaccgcttctgtaagcagccaagacggggccccaactcctgggccccctaagccaggcaaccctttcccaattggtgacccaagccgctggggatgtggctcgccacccacagctattaggaaggccttctaccctgcagtaccatgccatctccacagggaaagactcaaagtccagcctcagtgctgcccggcccttcagccacggccatggtacttgtgcacaggcctggggcagccttgtgggtaggaggagcccagtgggcttcatttcacggcctagtcctgcccttcccagctgcatgacctgaagcaagttcctgcccgtctctgagcctgttaacatgcaggggatatggtgttcacggtaacctttcttaggaggcagcaaggcctgggtttggcttgtaaaagatttccgtcccaatgcaccctgacggtgggcagcttgagtgtctaaaccttcggccctcaggaggtctgctgcggggtgcaggtgcccagcgtggctgggctcacactgatggaccggcaaaatggggagggccagggttgaggctgttcctcacagacaccatctgctggtttgaggaggggccccaggcccacagcatgactccctgctcctcagataagtatgctgtgcgcttcatccctcgggagaatggcgtttacctgattgacgtcaagttcaacggcacccacatccctggaagccccttcaagatccgagttggggagcctgggcatggaggggacccaggcttggtgtctgcttacggagcaggtctggaaggcggtgtcacaggtaagtctgtcggtgcggctgcacgtgtgcacacagctgctaggcccttgcctccaagctcttggtgacaacaggaggcacctggaggtgacaagcctgtgctgggtggccgaggacagggaggcaggccagtctggctctgcctgacctcctgtgctcccagggaacccagctgagttcgtcgtgaacacgagcaatgcgggagctggtgccctgtcggtgaccattgacggcccctccaaggtgaagatggattgccaggagtgccctgagggctaccgcgtcacctatacccccatggcacctggcagctacctcatctccatcaagtacggcggcccctaccacattgggggcagccccttcaaggccaaagtcacaggtgagcctggggccaagctattggcatctgcccaacgcccggcaccacagccacctcttagccccacccactctgccttgcaggcccccgtctcgtcagcaaccacagcctc

SEQ ID NO: 43018 - DNA, 1045 bp, Artificial sequence
  DNA replication origin
agggccgggtgaaagagagcatcacccgcaggcgtcgggctccttcagtggccaacgttggtagtcattgtgacctcagcctgaaaatccctggtaggggctgtgggaagcctggggaggggtcctggggctcaagcagccccaagaggaggggtggagcccagggctgctgctcactagcccatccccaccctgcagaaattagcatccaggatatgacagcccaggtgaccagcccatcgggcaagacccatgaggccgagatcgtggaaggggagaaccacacctactgcatccgctttgttcccgctgagatgggcacacacacagtcagcgtgaagtacaagggccagcacgtgcctgggagccccttccagttcaccgtggggcccctaggggaagggggagcccacaaggtccgagctgggggccctggcctggagagagctgaagctggagtgccaggtaggcctgctcacaccccgagtgctcgctctcctgcgttggccagggtggggttgggggtggaggaaagagccggcaggcatgtctaccttggctatgcctggagggggccgaggctggtgaagcagccttcagtgaggacaaactgttctcccacagccgaattcagtatctggacccgggaagctggtgctggaggcctggccattgctgtcgagggccccagcaaggctgagatctcttttgaggaccgcaaggacggctcctgtggtgtggcttatgtggtccaggagccaggtactgggaacccggctggggttggaggaggtggggcctgagtgtgggtattggacccagggctggcacagatagccctgcctggcactcactcttcactttgaggtcacagggccacccaggctgttcgtgggaggtgggaggcccaaaggctgatgagccggtcttacactctttccctgcccaggtgactacgaagtctcagtcaagttcaacgaggaacacattcccgacagccccttcgtggtgcctgtggcttctccgtctggcgacgcccgccgcc

SEQ ID NO: 43019 - DNA, 1204 bp, Artificial sequence
  DNA replication origin
gccaggctgcagggggcactctcactgccaggcctcacagcccacagccccccaagcctccacggcggagacccagatcataacgtcactgtctctcccctttcctcgggcactctggggccctggagcctgctcagctgctctgccctcgcaacccagcagtggtggctgtagcttgggcctcctgttccctgtctccctgggtgctatccccgctctgccaagcctgctgcgctgcgctactcgggtgctaaccccgctgcctcccgcttccccgctcccactcctgtctgcaccgggctgcttttcaccgcgagccttctcagttgtcaggaaactccggtttcaccatcaggcctggggggtggggaggcaagtgtcacatccccccacgctgcagcaggactccgcctcaccgcgtccacacacagcaatgggggccggggccaggccagaagggcgcaggcagccgtgtgcccagccagatgctggcgttcagcagtgtgggccatggtgctggacgaggctgagtaggcaagggagtggctgtcaacacttaggctggagtgggcccttccttttcctcccaggcacctgggtgctactgtcgggcctctcccacatgggcacttgaggtggtcaggagaaaccttcctgccttctgagaaaccactcgccatcccagcttggaggggcagggcggggcaggaggcctggcggcctggctgtgcttggtggtggcaatgagaggcctgtgtgggcggcaggcggacgggaacaacctgaacccgagctcacacgctggcccccctttggggacccaccctgccccaccaggtgctggcatcggccccaccattcagattggggaggagacggtgatcactgtggacactaaggcggcaggcaaaggcaaagtgacgtgcaccgtgtgcacgcctgatggctcagaggtggatgtggacgtggtggagaatgaggacggcactttcgacatcttctacacggccccccagccgggcaaatacgtcatctgtgtgcgctttggtggcgagcacgtgcccaacagccccttccaagtgacggtgaggaggggtggggggtaggtcagcaggggtgtctggcaggtcccggcctgttcccctggggcccctctgtgacaacagactctccagcagctctctgctttgccctgcaggctctg

SEQ ID NO: 43020 - DNA, 975 bp, Artificial sequence
  DNA replication origin
aggagcgagatggctttatagagcaggccgtaggatccgatgtgtgtgtgacaggcgtgtgtgcgcagggcgggggaggctggggagtactgattgcagggccttgggggctttgagggtgggagcaagactcagtaacctcagtttccctggctactgtttgcagaatggagacagggagcccggggtggggaagggggcgctgaagttgctctctggcaagcttgacggccacggggcttcagtgagagccaaattaggaggcatactttgaggatggagtggctgagacctgcggttggctgggagccgggcagggaaagtgggggcagtcgggtacctgtgaggttggggcccaagccactaactagatggcatggggtgcacatgagtgaagcctcccagggcagcgtgggcagccggcagccaggtctggagcctgggagagctgcctggccgcggcaggccagcatggagcctagtgcagcaggagccctcggccgatagtgggacttggtggcagggcccctcgagcttggccttcaagtaggtttcgtgctcctggctgcttccctggcaggaggccaggctgcagggggcactctcactgccaggcctcacagcccacagccccccaagcctccacggcggagacccagatcataacgtcactgtctctcccctttcctcgggcactctggggccctggagcctgctcagctgctctgccctcgcaacccagcagtggtggctgtagcttgggcctcctgttccctgtctccctgggtgctatccccgctctgccaagcctgctgcgctgcgctactcgggtgctaaccccgctgcctcccgcttccccgctcccactcctgtctgcaccgggctgcttttcaccgcgagccttctcagttgtcaggaaactccggtttcaccatcaggcctggggggtggggaggcaagtgtcacatcccccca

SEQ ID NO: 43021 - DNA, 1087 bp, Artificial sequence
  DNA replication origin
tcttggggccgattcccaggacagttccagctgcagctctaggcagggacagagttgggtggggtgcagaagatgaggccgtgggctggagggcgagggcccagggaggcttccggagctgagcatgaccgctccagctcttcccctctctgggcctttatttccccatctgagaactcgggttgcagctgagagctttggggtgaggtgcatcctgagaggcaccccactggggactttggggtctcgggatcttggcacccagggaggcacaagggctcctgcgtgggctgagggaacaaggggtctccccaactcaatgggagccccagccctggccagatccacagacccccatccccaccttccaggggcctctgcgtcccgggccgggggaggtgcatgagcgggtggggctggctggtagtgcagtagcgccagtgtcgactgcttgggcggccagcatggcggggcccggcccagcctcagagccccaaagtgcattctgtggcccgtctccctccttcccccttcccctatcccccagcagtgacgttattcagacattccccaacaggcatggagggtcacctgccccagccagggacacccagggatgctgatgagaggctacaggcctggcacttgggcgaggtggctaaggaaagggtgagagggtggctagagttttgcggcaggagcgagatggctttatagagcaggccgtaggatccgatgtgtgtgtgacaggcgtgtgtgcgcagggcgggggaggctggggagtactgattgcagggccttgggggctttgagggtgggagcaagactcagtaacctcagtttccctggctactgtttgcagaatggagacagggagcccggggtggggaagggggcgctgaagttgctctctggcaagcttgacggccacggggcttcagtgagagccaaattaggaggcatactttgaggatggagtggctgagacctgcggttggctgggagccgggcagggaaagtgggggcagtcgggtacctgtgaggttggggcccaagccactaactagatggcatggggtgcacatga

SEQ ID NO: 43022 - DNA, 1044 bp, Artificial sequence
  DNA replication origin
gccaggccctggggctgaggatgggtgccaagctggctggccgcgcctgttgtcatgtgggaagtgtgggatgttttagtctccattctggactctgccaggtgcaggcagcccttttgggccatagcagttaagatgcctgaggcccagagactgtccctgtagcagcagcgctgggcactctgggagcgcctgaggcaggcccggggctactcgggcttgggccaactgcctcccctgcctctgccacacaggatcccgaaggcaagccgaagaagacacacatccaagacaaccatgacggcacgtatacagtggcctacgtgccagacgtgacaggtcgctacaccatcctcatcaagtacggtggtgacgagatccccttctccccgtaccgcgtgcgtgccgtgcccaccggggacgccagcaagtgcactgtcacaggtgagcccgcccgctgttggccgctgcggcgctcggcacggggcttgggttgtgcctgtgtgcaagggctcgctgcttggggcggcgtgtgggagtgggggccgcccccttgagtgactcacctgacctttctccttgctctctgccctctcacctcagtgtcaatcggaggtcacgggctaggtaagctgcttgctggggccactcccaatgcccctcctgcccagaggggcagcttcctttcctcttggggccgattcccaggacagttccagctgcagctctaggcagggacagagttgggtggggtgcagaagatgaggccgtgggctggagggcgagggcccagggaggcttccggagctgagcatgaccgctccagctcttcccctctctgggcctttatttccccatctgagaactcgggttgcagctgagagctttggggtgaggtgcatcctgagaggcaccccactggggactttggggtctcgggatcttggcacccagggaggcacaagggctcctgcgtgggctgagggaacaaggggtctccccaactcaatgggagccccagccctggccagatccacagacccc

SEQ ID NO: 43023 - DNA, 1712 bp, Artificial sequence
  DNA replication origin
ggccagggtgagttgccctgccgtggggtatgtgacgggggacagggaccagaacccccgagccccaagcctcctctctgtgcctttgcaggtgtcttccgtgaggccaccactgagttcagtgtggacgcccgggctctgacacagaccggagggccgcacgtcaaggcccgtgtggccaacccctcaggcaacctgacggagacctacgttcaggaccgtggcgatggcatgtacaaagtggagtacacgccttacgaggagggtgcgtgctggggactcccacaggctggcagacggggtgggtggggtggcccgggctcctcctgacctggcctgcactcctccaggactgcactccgtggacgtgacctatgacggcagtcccgtgcccagcagccccttccaggtgcccgtgaccgagggctgcgacccctcccgggtgcgtgtccacgggccaggcatccaaagtggcaccaccaacaagcccaacaagttcactgtggagaccaggtaagggagcccccaggagcccgtgtggctggtgggcctgggaaccccaggaatgaccggctgtctgtttggaccaggggagctggcacgggcggcctgggcctggctgtagagggcccctccgaggccaagatgtcctgcatggataacaaggacggcagctgctcggtcgagtacatcccttatgaggctggcacctacagcctcaacgtcacctatggtggccatcaagtgccaggtgaggaggtggcggccagggcagggctgggactgtctgctcgtccccaccctgtctcatacagccgccatccctttgccccaaccctcaggcagtcctttcaaggtccctgtgcatgatgtgacagatgcgtccaaggtcaagtgctctgggcccggcctgagcccaggcatggttcgtgccaacctccctcagtccttccaggtggacacaagcaaggctggtgtggccccattgcaggtcaaagtgcaagggcccaaaggtgagtgtttgcatgcctggagccaggggtcaggagggcagtgtcctgtttgagggccgggaaaggaaactggaggcccaaagtgaggaccagagtgcagaggtggtgcaagtgtgtaggtgtttttggaagagcctcaggtgacagtgcagccaggtgggggacttggaggaggtagagcagatgggactggtcactgagcagatgtggcaggaaggcaggcaggcaagggtcccagctggcacccagatgggtgtctttcgtgccagagggggtcaaggccattcccagggtcgggtggatgaggataaagcgaggtctaggcctggggctgggtcctggccgtccagtgtggtggggtaggaatggaggcccaggagactagctgatgctctgtccctggggctggggccaggcctggtggagccagtggacgtggtagacaacgctgatggcacccagaccgtcaattatgtgcccagccgagaagggccctacagcatctcagtactgtatggagatgaagaggtaccccggaggtaagaggcagggcctgctgcctgtggggagtggcccaggctggatgctgagaacctgtctgactgctcacaacaccaatccctcacagccccttcaaggtcaaggtgctgcctactcatgatgccagcaaggtgaaggccagtggccccgggctcaaca

SEQ ID NO: 43024 - DNA, 907 bp, Artificial sequence
  DNA replication origin
ctgaggggttggccacacgggccttgacgtgcggccctccggtctgtgtcagagcccgggcgtccacactgaactcagtggtggcctcacggaagacacctgcaaaggcacagagaggaggcttggggctcgggggttctggtccctgtcccccgtcacataccccacggcagggcaactcaccctggccctcaataccaggcccatagcactggacaccggaagtgtccaccgcaggttccacctgcagcttgctggggaagttgggcacgggctggccgccgtacttgatggtgacggtgtaggccccggggcagaggggaatgtaggtaatggtgtgcgtgccatcaccgtggtcctggatgtacacctcggccggaagccccgcctccgagcagatctcaatggtcagctccgcgctgcccgcgctcgagcagtccacttggaattggcccacctccccagcggtggcccgctccagcccggggcctgagcacttgactttggatgcgtcaaagcagggaaccacgtgggccttgaatggggagccagggatgtgggtgtcagcgaagaggatgttgatgttgtagtccccgggctcggtgggcacgtaggacacggaacatgtgccatccccattgtccaagcactcgagctgcgcctcacaggggccctccaccgtcaggcccaggccacctgtgccggcgcccttggtgtcgatggtgaagcgggcgggggagcccgcactgcctccctgcagccccggcccaaacgccttcacctgagggaagaaggggtcaggagccaaggccacactatgccccgatcccagacctcctgcttgactttccacctgcctccccttgccctggcttcctgccctcaccaaacagggacacgggcgggc

SEQ ID NO: 43025 - DNA, 1226 bp, Artificial sequence
  DNA replication origin
gctctctgctctgcccacagggtcaacggtacttggatctgtcttcttcttggaagggggagggtggggggctctgggctggtgtggagcaggtgggaggaggcctgccatgtcctggcccaggccacagttcctggggtcacagtcccttccagttctgtcttgcatgtccccctccagccaagctctgagggacccaccaatcctgacagcccggccctgtgggaggcaagggaggggtcgcccagccgagctgctggtgctcagctggcccctctgcctgcagcctgtaacccgagtgcctgccgggcggttggccggggcctccagcccaagggtgtgcgggtgaaggagacagctgacttcaaggtgtacacaaagggcgctggcagtggggagctgaaggtcaccgtgaagggccccagtaagttggcctggagccaggccaggatgggtggcggcagcccccgggttcactgctgggcaggcctgaggccctccttgtcttggcagagggagaggagcgcgtgaagcagaaggacctgggggatggcgtgtatggcttcgagtattaccccatggtccctggaacctatatcgtcaccatcacgtggggtggtcagaacatcgggcgcaggtgaggcccccaggcatccctctcccagctctgcacactctgcctcttctcttccttctgcctccccacctgatgatgaggggccacatgggctcttcctgcctggccgccacagtggggcccacgctggctcatgtggtgatcctcggtgttccctgtgtggctctcgcatttgcagtcccttcgaagtgaaggtgggcaccgagtgtggcaatcagaaggtacgggcctggggccctgggctggagggcggcgtcgttggcaagtcagcagactttgtggtggaggctatcggggacgacgtgggcacgctgggtaagttggaggctgcagcatgggcacctggggacagacgatggcaaggacggcccaccctgaggctccagggcactgaggggactggtggctgttgtcaggcttctcggtggaagggccatcgcaggctaagatcgaatgtgacgacaagggcgacggctcctgtgatgtgcgctactggccgcaggaggctggcgagtatgccgttcacgtgctgtgcaacagcgaagacatccgcctcagccccttcatggctgacatccgtgacgcgccc

SEQ ID NO: 43026 - DNA, 1488 bp, Artificial sequence
  DNA replication origin
gtggaacagggagaggagagggatgatgagtcttctcttcttcagaattgagaggccttccagttaccctgcagccctggaatggcccttgctgaacccaagaaagtgagggaccaagacttgggttcccccagccactcagagggcagatcccaagaaccaaagttctttctttggaatgccagttgaggcgaggggcaggcccacccccacaagtcccagcctcagtctagccaagctgagtcatctcagtcctggatggtagggggggcgaccggatgtggggaggcgggccacaccccagctctttagggggggtctcctccctcctcccagctcccctcctccttgtgagctggctggagcaggcctagttcccagagctttgccatataaggcaaaaaaatgttggaaagcagcagtgattaggggagggaggggttggctggcccaggggctggggaaaggggggtgggatggggcggggccatccagccagacagtctcccagccctgggccctggtccttccctctctcttttgggagggggatggggacggagtaggctggcctaacatggacctggtgggcctggttgctccccgtgtgggggtcgttgaggggtctgaggctggactggggtgggggcctgatgggaagccctggctggccttgttccctggccctgcacccttggtcctctccgagtccccctccctgctgccatttggggagagtgaaaggcagcctcgtggggccaggaccaacctgggaactggggaggccactctgagcggctcacctggccctccaggtgctgcctgctgggctgggaagcagctgccatggacagcccagcccctcctcataggcccgccccctagttgactcaccagagaagtattttgtctgattatgggggaggctgacagggcttctaaagatgagccatcctgccttgagcctgagacccagaagtagccttgggtggggcccagagcccagcagggttgccatggtgatggggggtgtcagggacccgccctaaccacttcccctgtggcgagcctgccgaggcccagaggcccgttaggtggcaagtgggtcaggcagtgggtggcaagggggttcccagtgtctcctgctgccaccccggcatctcccgatgggccccagtgagtcagggccatgtggcccaactgctggttcctttgggctctgggcccctcccctggctaggcctgtggcctcccaactccaagcttgagtcttcgaggtggtagaggaagtgggggtggtggcgggggtcacaatccctcacccaaagggcgtttgcccaactcccccacttcccctgcctcaccccacccaccctggaacaacagttgtatttcccaaccacccagggccacccaccttcctcttcctcagccccagccccactccaggtcatgggccctggattctgggccagctggagtcagcct

SEQ ID NO: 43027 - DNA, 1142 bp, Artificial sequence
  DNA replication origin
gaagatgcaccgcaagcacaaccagcggcccactttccgccaaatgcagcttgagaacgtgtcggtggcgctcgagttcctggaccgcgagagcatcaaactggtgtccatcggtgagggacgccccgaagcgccgggcgggcgggggcggggactccgtgcgtccttccatctccccgggcggacccctccaaaccacccccttccgggccgcagcgcaactcccgaggcctccggctgctctgctccacgcgggcctgcagaacaaaggcgcgcgggctggctggctggccggccgggcgtgcgaaccgctacgcgcccccgcccgctgcgccccggctggccggcgcccaggctgaactcacatcctccgcaggccgcgcctccgcggctgtgctcgcggtgggagtgggcctggggggtcgggcactgggcaggctcctggccctgcgccccgtccccgaggaggaggaggcccgggctctccccccacagctgtttagagagggccctctggccttcagaggcccgttggttctgaagtgtgggttggagctcgtgcgtcccattgtctggggctctgggctctttgtgtccctggaggatgggtcgcccatcggagatggctccaaccaccagtttagatctacccccccacacacacacaggcaacctgggggccagaaagaagcatagttagcaaaactgcacccggggtgagttgggcgtggttgactgagagacctggcttgtagactacttggacgccaacttttctcttcatcttgggccaaactcttgcttccatgtaggccttgcttttctgcgtgtagcacgcaggagttggttggtagatgctccagcgtgcattgtgccagcccagtgtctgtgtcactggactggagaggctggcattgaccaggcctgctgcagcagcccaattcgttctcaagataggggctgcatgagagggcaggccccagaatgggtgactcgggggtgatgtggaacagggagaggagagggatgatgagtcttctcttcttcagaattgagaggccttccagttaccctgcagccctggaatggcccttgctgaacccaagaaagtgagggaccaagacttgggttcccccagccac

SEQ ID NO: 43028 - DNA, 796 bp, Artificial sequence
  DNA replication origin
acccatcctccagggacacaaagagcccagagccccagacaatgggacgcacgagctccaacccacacttcagaaccaacgggcctctgaaggccagagggccctctctaaacagctgtggggggagagcccgggcctcctcctcctcggggacggggcgcagggccaggagcctgcccagtgcccgaccccccaggcccactcccaccgcgagcacagccgcggaggcgcggcctgcggaggatgtgagttcagcctgggcgccggccagccggggcgcagcgggcgggggcgcgtagcggttcgcacgcccggccggccagccagccagcccgcgcgcctttgttctgcaggcccgcgtggagcagagcagccggaggcctcgggagttgcgctgcggcccggaagggggtggtttggaggggtccgcccggggagatggaaggacgcacggagtccccgcccccgcccgcccggcgcttcggggcgtccctcaccgatggacaccagtttgatgctctcgcggtccaggaactcgagcgccaccgacacgttctcaagctgcatttggcggaaagtgggccgctggttgtgcttgcggtgcatcttcttctggctgagcacctccaacagcgcgataagccgcagcccgtcgctcaggtccgtctgcaggttggcgatgcgcttgctcacgcacttcaggtgctcgttgcaccagcgcgtgaaagtgttctgctggatcttcttccacggcgcgtcctccgccaggtccttctcggtggccggcatctcggcg

SEQ ID NO: 43029 - DNA, 2661 bp, Artificial sequence
  DNA replication origin
ctgcacatccctaccccccgccgtcatcccccttccccgggcccccagggcctagggttccccggcggcatccccgtccgccggcccggcagcggcgggaaggggccaaccctaagagcgaacccctggagagcggcagccccggaccaggcactgccgagggcgctttgtgtgctcatcacctgggaagcggctgcagggcaaggcctgcgcctacgcggtccccgcagaccccctgccacgggcccgccttcccagtccgtagggccctcgcccgcgcacctgtgcccgctgcttcccaccgcctccctctctgcttccctccacccgggaggatatggggcactgggccaggaggccgccggcactccaggagcaagcagccttcgaaggggtccgggcatgcccacgggcacgccagtgggcgcgggcagagggcgccgtgcgatgcatgcagagacgtgtgcccgcctaacccttcatgccagttcacccggggcactggggggagctgaagcggggggtcctctcctgtcggaaagtcccctcagcccagcgtggccagggcagggggcaaacacgggagtggcattccagacccagaggggcctgctcagaggttcccataagacttgtcaggctctgagcacctgggtctgggtgggcttcaggtgtggtggcaggtgcagaggaggcctgaggacagggatcaggggcctggggggttgtgtccccagagctgtgggggctcttcactcaaaattttctggtagataactctggagatggtgcagtggctgctgtgccgagatgtagactgggaccaggggacggctggggacgctcactgctactatcttcagtcagaagccagcctgcctatggcttcctccccattgtgcactcccctccctctcagtcctcggtacctcccctctccagaatgtttcctcctctgagtgttttttttttttttctaggaaggcaggtatctgtccctcctgttcaattctagtaataattaatttatctgctaaagaccagtgagagatggaggccctgggttggccagcacgtcatgcccaaatatggttgactctcctgtagccctgggtgtctacatgacacgtggtggggctgtgatccgcccagcacattcacttcggggcagcctgtggccccactggtttttcccactagtagtggtgttagggggtgcaaatggcattttccagtactgaggccaacccctgtatattgtcccctctcctgaccactttgagacacacctgcaccaagtgcgcctgggcgtctgggagctggggtggaggtgggagggagggctgggaagggggaacccatacagacccctccctgcacgggccccattcaagacgggcttgaagttgtccttctggtccccctgccccactggaaagcaagttcccaggcacggaattccatcaataattgactctctctccactaagggccattgagctgggttgtctgggttcattccttaatcttcagagctcagggaaactgagtcagagtgaccagtggtcaattccagcagaaagagtgtcaggaggtgggtgccgtgtcttccagccctagcttttccctatttagaggaaacaaggaatgggcgtgtagagggttcttgtccctagaacatagtatcaaccgccagatgtcgcccgatcccaaagccaccagatcgggcagtcctgggaagccaaaatccagctctttcatattttcccttatttggagtagattcttggatgttaggcacaccccgcccaccacaccacccctggccctcagaccccaggccagaccctcccactgggaggtatagcccaagcccaggagctgttcagctgggatccctaaggagctgtttccaggcctgcgtagccagggggcgcaggagggaaggaagccgcagactggcaaggtgagaagagacctgtgctggcaagtccaggtgcggcaggtgaggtcgcccattcccaagctcccaccttgacggtgcactcggagcacttacaaatgggtctgccagtggattttaacctattttgcctggccccaggtggcacgggaatctggggacattgttggttatatcctggctggcagtgcgcatccaactcagagccaacctggcatagggcccagggcccaaccaaggaacctggcctggtctcatcctcaccatggcccccatggagtagagcagccccagaaccagctcccctgtgcccaaagcagctggtgccctgtggactcgagccagcaagggacacgctgtccccctcccagtgggcacactggctgagaagtgtccttccaggtggccactcgccctgagtccacacaagttcctggtgtcagggcccttctctctcaggcatgcagtggtccgttcatgggcaagtgcccagacaccctctctctctcggggaccccccatggcctcaggctcccacattcgtgggcacagacatggctcgtgggtcaactagggaagctattctctggacactcactcccagatgccaggggagcctccatcggctcacgcatcccagctgaacctggcccggacctgggcgcgagctggcgcctgcgttttccggcctctctgcc

SEQ ID NO: 43030 - DNA, 1237 bp, Artificial sequence
  DNA replication origin
ggcccggacctgggcgcgagctggcgcctgcgttttccggcctctctgcccgccttctccaaccccgcccccggccgacgaggagcgcggcgaccctacggcgcgaagccgggccgcggagacctcacctgctgttcctgagagcgaccggtgaccgatgaccgcggggtggcgcccggatcgccttcgcgcccgcgcccgcgccaggcgcctcggggattctgtcggcgtccgctgcgcgcgacgcgcctccacgcgaatgggccgccgccgcccgccttcttgttggccgcacccccgccccgcgcccgccccgcgcccggcccggcccggcgagaaagccttaattggtaaaattgcccaggagcccgggacgggtgcgtggggggcgggggtgcgggggcacgccgtgagctccagcgacccgccgccgggcgacgccgccccccgagatgagctcaccgccggcgagggccgccaggccctgggggagggagggcttcgtgggggagtcgcctccagcgcccacagggactgcagggctcgtgtctaggcccaatcacaaggatcctgcgtgtctgagtctgggggagccaagcgcaccccaggtggaaaggccgaggcccaaggccaccttctccaaggagccacccacagtcacagcccctggtgtctgtcccaagccgggattgtttcctggggtgggggcaacaggtcgttgcaggtgttggctgggcgcctacgtcaggcagggccccgggacgggactgcagggctccgagccctgggatgaacctgactgccatggatcaggcgctgccaggtctggcctggggtgggcagcagaaacaggatcgctcagggggacgagaaagttaagtttgtttagtattaagaagattctgatcttaaagaaaacattggccgggcatggtggctcatgcctataatcctagcactgtgggaagctgaggcaggtggattaattgagcccgggagtttgagaccaacctgggcaacacagcaagacactatctctaccaaaaatataaaaattagctgggcgtggtgacgtgcaccggtagtctcagctgctcaggagacagatgggaggatcgtttaagcccgggagtttgaggctgcagtgagctataatttcaccactacactccagcctgggtcacacagtgaaaccctgtcactaaacataaaaaaaaaggccaggtgcggtggttca

SEQ ID NO: 43031 - DNA, 1294 bp, Artificial sequence
  DNA replication origin
ataaaaataaaaatacaaataaaaaaataacgttaacagctcagtgaacaatcatctacttgtcatagacactgaggaatgtttccatgttgatattttttcctcgtaactcaatcatgttgggattgtaagttatacagcatatactgcttgcaagccattccatccttaaggagcaactcagttttcttattcttgacttagaattggttgcatcccgatgtctcctctgcctgcacttcccaggaagaaccccctgaggccctcagattttcctgcacacgcccttcccagaccctctgatgactgcaaatcccaccctacccttgacgggaaactctctgaggctgtccaggtcatcacccccagggaccaggtactggtgggggaatgttccatgaattaattgctgtactcagggctcttggacaagtctcccctgatcgcagggtcctgactctccctgtataagatggaggctctgctgctcaggagcctgcctggcttccagtggtctggagtggagctgcactgcaatggggctggacttaggctccaggtacccacagggtgggtgcagggggaccatcacagttcagcttcctggtgccatctgtggtgggacctgattgtggggcaaaggggtgggacataaaaggcagagtgtcgaggcaggtacagaacgggtggggggtgctccttagggagaaggcaaatctagaattccttgacctcataaggaaacagcttggatccgtatggggaggggtggcatgggggaggatggagcagcacttagtacacagaggcctctgggagaggggccaggattgcagaaggcttgcagaggtgctggggaatctgattttgtcaaaactaaaaaatccacaaggcagcctctgagcagcccagagtccaaactgccatctgtcccctcagctctgaaagatgaggtgcaaacccctgccctacccaaggctctcctgctgcacactgccaggcactgtcttcatggacccacacttccttccatattgctggggacacagtggggccttgccaacagtgattcctctttgttaggatctttgcgtgtagtcaaaacagggccccatctcctcattactcccccaggtgtctacctcttcccaccccatgggcaaacctccatggatgactggtctgtgaccctcaccagccaggccagccattctggacatgaccagagccctcccctcttcttcccttgtcaccagccctcaactgtgaaactacagatggcatgtcacctctt

SEQ ID NO: 43032 - DNA, 1228 bp, Artificial sequence
  DNA replication origin
ttggctagcggcgtagggggcggggcccgcgcgggagtcagggcaatgcaaaccggtatcgctgtgggagcaggcggggctgcgggcccaaaagtcacaaacgcacagattggctagcggcagggggcggggcccgcgcgggagtcagggcgatgcggctgggagcccagacgtcaccctgtggcgtgcggcggggtgagaggggcggggcctgcgcgcgagggacccgggacgtgcgagcgggcgaagtcggcgcttggggtggctctggtccctaagtcgcttgggcttcgcccgatccctgcacatccctactccccgccgtcgtcccccttcccagggccccagagcctagggttccccggccgcatcccggtcggccgccccagcagcggcgggaagggcccggaccctaagagagcgcgggccccgggccaggcgctgccgagggcgctttgtgtgcgcatcgcccgggaagcggctgcagggcaaggcccgcgcctacgcgatccccgcagaccccctgccatgggcccgccttcccagtctgcggggctctcgcccgcgcacatgtgcctgctgcttaccaccgcctacccctctgcttcccttcctcctccctcgctccacccgggaggaaatggggcactgggccaggaggccgctggcactccagaagcaagcagtcttcgaaggggcccgggcatgccgacgggcacgccagtgggcgcgggcagagggcgccgtgcgatgcgtgcagagacgacgtgtgcccgcctaacccttcatgccgttcattcacccggggcactggggggagctgaagtggggcgtcctctcctgtcggaatggtccctgagcgcagcgtggctaggcagggggcagacgtgggtggcgagctatggattcccattcccagggccttgatcagatattggctgtctcatggagaagagaaaggaggtgacattcatcattcatattcttttttttttttttttttttttgagacagtctcgctctgtcacccaggctggagtgcagtggtgcaatcttggctctctgtagcctccacctcccgggttcaagtgattctcctgtctcagcctcccgagtagctgggagtacagtcacatgccaccatgcctggctttgtatttttagtatttagtatttgtatttttagtagaaacaggatttcaccatgttggccaggctggtctcgaac

SEQ ID NO: 43033 - DNA, 1039 bp, Artificial sequence
  DNA replication origin
attcggctgtgacgcgacaacgattcggctgtgacgcgagcgcggccgctcccgatgcgctcgtgccgcccccgccgtgctcctcggcagccgttgctcggccggttttggtaggcccgggccgccgccaggcctccgcctgagcccgcacccgccatggacaactacgcagatctttcggataccgagctgaccaccttgctgcgccggtacaacatcccgcacgggcctgtagtaggtacgcggcggcgggcgggaccccttccgggccccctcctcgtgctccgcctcgcgacctccccgctgccctccccgcgcgccttccccggcccgcggccctgaccgccccgtgtccggccaggatcaactcgtaggctttacgagaagaagatcttcgagtacgagacccagaggcggcggctctcgccccccagctcgtccgccgcctcctcttatagcttctctggtgagagcctcgcctgtggggacagcctgggacgcggggaggatggggtcgcgagggtgtggcaggggggccggtcgagagcggcactggagaaaggggagggaagtctgggggggcaaacagttctgtctcctcctttcaatccagacttgaattcgactagaggggatgcagatatgtatgatcttcccaagaaagaggacgctttactctaccagagcaagggtaaggcaggggttgggtgggcacgctggcaccttcacccgacttcgtcagggaccccgctcacagggaggacctgagacctcagtcccaaccactccagcagccttaggagggagaaactgttacaggtcccgaaatgggattcagattagggccatcaggccaggcggggcacaccgatgccccctctgctaccgctgccccccttcccaaggctacaatgacgactactatgaagagagctacttcaccaccaggacttatggggagcccgagtctgccggcccgtccagggctgtccgccagtcagtgacttcattcccagatgctgacgctttccatcaccag

SEQ ID NO: 43034 - DNA, 1074 bp, Artificial sequence
  DNA replication origin
tcgactagaggggatgcagatatgtatgatcttcccaagaaagaggacgctttactctaccagagcaagggtaaggcaggggttgggtgggcacgctggcaccttcacccgacttcgtcagggaccccgctcacagggaggacctgagacctcagtcccaaccactccagcagccttaggagggagaaactgttacaggtcccgaaatgggattcagattagggccatcaggccaggcggggcacaccgatgccccctctgctaccgctgccccccttcccaaggctacaatgacgactactatgaagagagctacttcaccaccaggacttatggggagcccgagtctgccggcccgtccagggctgtccgccagtcagtgacttcattcccagatgctgacgctttccatcaccaggtgagctggctggcaggcgtcctgtacttgggtacaacctaggggatcgcggctgtgtttggataaatccaggggggcactgggtacaaatggtggctcttgggcctccggggagactctgtgtgactagagcaccctggtctgggatctaggctcagactcttcctgagagtcctgggggcaaaaggggatgctggggcatgagcacaagtggcaaggccccatggataaagggctgaacacccagagccattcaggagggtgtgggttcctggcctctaaccaaaggtcagaggggactggctggggaagtttggactgagggacatgacagggccatggtggccctgccagccagtcccctcgccctgactctcttctgcaggtgcatgatgacgatcttttgtcttcttctgaagaggagtgcaaggataggtgcgtagtgggggagcccagggacgggctggttctgggtccaggctcctggcccacttgctcccctcttttgcctcagggaacgccccatgtacggccgggacagtgcctaccagagcatcacgcactaccgccctgtttcagcctccaggagctccctggacctgtcctattatcctacttcctcctccacctcttttatgtcctcctcatcatcttcc

SEQ ID NO: 43035 - DNA, 1272 bp, Artificial sequence
  DNA replication origin
ggcttcccaccggctcctggggatgttggaccggggctccccgaccagggctgggaaaggcttccatgaagagccagagagcacacggcgcagaccctgcggggcacacggggtctcggtggcagagtctcccttcttggggttctctgtgatgggttttgcaaccctttcaggatgtcaaagcacgccccgccctcagaaatgcaggccccggccagtgtcagccccaggaggtggcctgctgctcccgctgacaccaaggacatgttcctgaggcggcccgctcgggatctccagcagccgacgcaggtctacacgtgcaagggtgcttctgactcgcagcactcaggaacagcctccaccctgagcgtggcgccctctccagcacgcgccagggtggacctgtgagaccaataaaaaccacagcggaggcgaggcgagtcacttaggagaccaggccatgaagagactgtggccgggtctggggcgccctctcctgctggttcgactggattgcaggtccgggggaagcccagcagccctggggaggaggcccggtggggaggaactgaggcctcctgccacagcctccagagggagagtcatcacgagggctccccacccagtcagataggatggctgggccccagtggacacctgaccgcagcctgagagggaccctgagccacagtcctggctccccgagagccctcccagagcctgtccctcagaacccttgggggggtgacacgagtgctgggggggtgagacgagtgctaggtggggaaggaccgaaacgtgaagtcgtctgttacccagtagtcggaactggtgcccagcgtccagggggcaagacacggcgtgagccagaaggaaacaaaccgacaagaacccccagaagccatcaggaaagcctggagattctgatgacacgaaaactaaaatcccctctgtgaccaagcacaacccgcaaaccacacagtcaagagacaagtgataataaggggagaaaatagtagcaagaggtgactaagggctcgcgtcagtcacacacacacagagccggacacacggacaaggcaaagtgcaaggacaagagagcaaaagggggcggaggagaggaagggagagggaaggaagcgtcttctccaccgggatgcaattccttgggagcccgtctgaccccagggcaaagagatgctgggtcgccagagccgccgcggagaagtcccgccgggcctcagagcccagcaaagaggaaccagggcggac

SEQ ID NO: 43036 - DNA, 963 bp, Artificial sequence
  DNA replication origin
gggccgcagcggcgcgcacgcgacggggtgtcgtccactgggcagcaggagcgtcagtcaagggcgaggggcgggaattccgtgcaatctgagcatggtcattggcgaggacaggcgaagaggaggacggataggcggggctgggcggggcttcccgtgggcgcctggagcttaccaggagcgaccgaagcggaggcggggagcgaggcagctgtgggccccggcgggcggagactagggctgtccctccacgccccgcccccgcctcggcaccgccttccgcgcctgcgagtcctgggccggccctgcggggcatgcgccgagtccccttcctttgcagaccggtggtcactgtcttcccccggggacgaggcggacaggcgtcgcctgagatcagggcccgggaagccccgtgagccgctctcgcctcggcgccgtcgaggggccgccccgcccttcccactccactgtgctgcgaaagtgcctcggggcgcgtctggggggtcgtggggaagcagggccgcgcccacccggcagcgtccagggagaggtgggcagagcggggcgggcggccgtcttgggggaagtggcgtctggaggtgtctgtgcaccattccgcggtggcgcgcggtggggtaacaaagtcttccccgtcccttgacagcggcggccgccggggagggaatcctgctctgctgcgggcggtcgtgggctggggcgcttcctggcctgactgtctcctgggggaggtaggaaaggcgagccccgcagagaaggcggtggcttccctcgacgtgggtgccaacaggagccatccctccagccggtcttcccgcgggagggtgcctgggaacacccgcagggctggttccagcacccatgggaccgctgggtccagcccagtgtttccggggaagccccgccttacccgccaaccttcccgcaccgggagggttcccagct

SEQ ID NO: 43037 - DNA, 999 bp, Artificial sequence
  DNA replication origin
gtctgggtgggaaggtgggcgggcaggtcagcagttcccaggcctggtgctggtcctccttgttggcggcgaggcggagacggggcgggcctgcctgttggcaagggtggggcgtccggcccagccaggcccttcctggccgggtggctcaggaacacagcctcttcctcttttttttcccctcctagccctattcaggcaggagctgctcttctggggtatcgcgatccacttaaggatgaggcagacttggtgacaagctggtctgagcaggtatgggagccccctggggagacggaagaagggaggaagttgccttctgcctggggagggtttgagagggagagggaagcctagggctcccaccaaggctgatattgacagccagggtttggggctgaagccaggaaccgtcgctctctctggttcttactggtagccctcatgggggtccctgacgccagagcctccaaggctgcatgtgccagcccagggctgcccacatacccatgtatatcccagaataggcaccagggtagggaacccaaactagcatgagtgacagagcaggtggtcagggagaaacagacatcaaacccagccaggagagagacaccgcaacagagagacagagaagggaaaccagagacgagagggaaagtgagacagagacggacagagcctcagagaggtaggaagtgagcccgaagggaaggtgacaggttgatagagaaaagcaggcagacagagcagaggaactcatgcctcaggatgcaaaagccacatggacagggcgtggagcaaggagccgagccctgcaaggtcaggtgagtgtgagacaaagataaactgagagaggggggctccagctggtgagatgaacaagaagggctccccagtggtggcaggggcatgggaaagagtccccatcacaggttgcaatggggatgatttggccatatctgagaccttttaaaatgcacacacccttcactgccg

SEQ ID NO: 43038 - DNA, 1738 bp, Artificial sequence
  DNA replication origin
ccggggtgccagcgcccgccttcccgtttcctcccgttccgcagcgcgcccacggcctgtgaccccggcgaccgctccccagtgacgagagagcggggccgggcgctgctccggcctgacctgcgaagggacctcggtccagtcccctgttgcgccgcgcccccgtccgtccgtgcgcgggccagtcaggggccagtgtctcgagcggtcgaggtcgcagacctagaggcgccccacaggccggcccggggcgctgggagcgccggccgcgggccgggtggggatgcctctgcacgtgaagtggccgttccccgcggtgccgccgctcacctggaccctggccagcagcgtcgtcatgggcttggtgggcacctacagctgcttctggaccagtgagtgggcccaggccgaggcaggcccgcccgggtacccatgcccggccggaggtgggacttagggtgggggacgccgcggccccgacctagcgggcgagcccggagcgcctgacttctccttccccgccagagtacatgaaccacctgaccgtgcacaacagggaggtgctgtacgagctcatcgagaagcgaggcccggccacgcccctcatcaccgtgtccaatcaccagtcctgcatggacgaccctcatctctggggtacccgggccagtgtgctgggcagggggaggaaaggcgaggattcgggacgggcccagcctcgtcagaacaaaccccttctcgctgccttttcatggagccctggcactccggtttccgggcgttctgccccagggctgagacttggatttgtggctcctgcagcatccctgagggagcatgatttggagagggccttgggcatggagcaggaccaaggaacggccacagggcatatcttacagctcctttaacgtcaggcctccagaaccctctgttctctaaaccatccagggccccacagtcttgggaaaaatttgggggttggacataggatatcctgtgaggaagttctgggccagggactggaagcccagtgtcctggcttcaggtttgcccctggctgggcgtgtaccgttcagccctatttgggagcctggttgccacacctagaggttcctgctctgctgacttcacaggaagttgcttggctctggtaaccagatggccgggtggaggggtgcctggggcttccactcctgaacagagagcttaactgtcctagagttcatggggagccacctagccacactggagcccttcagagctcaccctggctgctgggtggagaaaggcctatagatgtcacaggtggatcctgggaggccaggaaggaggacttggagccatccactagcctagactgggctggttgcagtgacagtacagggagaagtatagaagaatgggcattgtccaagtatgttggggaggtaggcagtccaggtgcagtgattagtaagatgtggagggtgggggagagggaggagccagggagaactgaatgatctggcctaagggtctgaaagatgccactttgggctgtagggaaatggtagtgctgctgtccctcattccctgagatggggtgaaggaagggcactccctggggatatgggaagttggggcatgaagcctttcctgtcctctagggatcctgaaactccgccacatctggaacctgaagttgatgcgttggtgaggaggaatgggcccctcgaagtgggccgggccggccccacct

SEQ ID NO: 43039 - DNA, 1389 bp, Artificial sequence
  DNA replication origin
ggggcctggctgcctcccgatgaccgggggagagtgggctggggcgggcgcaccttgtcctgcaggaacagcagcacattcctgggacccagctccagggcgggatctaagtaggtagagagctgcaagtcgctggtgatgtggccttcatgagtgtcggccgcaggagcccacaagtccctggcagggcacagaagaggtgctgtcagacgggggcgcatgtggactggagctctgtcgccggcagattcgctgcgagcccccgagcaaggaacagtccacctccgggcctcaccacccctcgcctaggacagcgccggagtcgggcgagggcgcctcagccgccacagcgcatcccaccccggcccgctcaccggtcactcgaccacagcaccagcgggacctgctgctccgccgctgccgccgccgccgccgccgccaacgacaaaaacaccggcagccacggcatgcgccagagcgcctgggcgcaccgcggccccatccgcactcgagccgtcgccatggccgccatcatagcctcagcctccactgcctcagcggcctcgacagccgcagatcaggtgaccgttgcccccgcccgagccccgcctcgcacctccattggccccagcgcgggccgaccggcagggccgcaggtaattggaccaagtgcatgccactcgcggccactccttctcactggttggctgtacgtgtctccaggcgctcacgctccgagtgggaaaggggatggggcccagctagaccgactaggacgagacaagagggacagggaggcttcgcggaaccctacgcccacccgacgcgttcgcccgtccgtttttatttttatttttattttggtttttttgttgttgttctcttcttttgtcttttttttttctttagagacggggtctagctatgttggccaggctggtctcgagtccccgggctcaagcgatcctcccgcctcagcctccggaaaagtgggactacaggcgcgcatcgccgcacccggccaatccctgttttaatccttttccttaaaattgcaaaagtggtgtctttttcctgcagatggaccctccctgatacaggtgagaggagactgtaatcccttagaacgaggagtgaagcgggctcaggatagcatctaggggaacacccagcacttacattgggcaggaggagaagggtccagaaaagagatcggacaaggagcaatcaaagaggaaggagaaaacccagagcgaagcgtggcatcaaagacaccctaacgggccgggcgctgtggctcacgcctgtaatcccagcactttgggagcccgaggcgggcgaatcatgaggtcaagagatcgagaccatcctgcacaacatggtgaaacc

SEQ ID NO: 43040 - DNA, 1060 bp, Artificial sequence
  DNA replication origin
caagaggcccaacgcatggcgacccgcgtttattttattaggaaggaaacaaccaagcaccccatgctcctgcccggcactcccggtgggaacatgccaaacagccggcgatcgcacccagcccacctgtcgtggaggtcccttccttctcaggccacagaaataaacccgtgtacttcttattgttagcacaacatcaccagaaaacgataacgacagccaagcaggacagacagttaagtagtacttccacactcccaaactcagggagccctataaccttaaggagggagcatttgctacacaaaagcactatccacagccagggatgatgtagccacaagaataaataaggagaaaggagaccctagaattcatgtcccttacgcctcacagcgacgaaccctgggaagctggttggtctagcatctacgcagaatatgtacaccttgttgggagagatgggggcagcccaagaaagctcctcagcgggctgaagagggagcaagatgggctgaggggagcttgcagttcatgctgcagtaggaagagggaagctcttcagtccagtgcgctgcagggtgggaaagcaacaacacggacaccgtcccaccctcaacccccccactggcacagggtcacacaatctgggtcaaagaaatagtggggcccttgtggtcatcaaagcgatccatggtcttgaggctgaggatcatgtgcaggccataggtgaagatgaagagcatgaacagggaggtgagcagccccatccagatgccgggggagaagaagctggcacagtcgctggcgtaggagaactgctcccccattacgttgaaagcctggatctggcagacacacagacacgggtcagaaaggaccgttgggaggcccagcaagaactgggacaggggcagcgcagggacaggactctcaactacatgcccaagcccaagcctctcttcgtctctcaaccactagcctgggctcccccacctgaagctgggccacgcccgctccatacctggaagtcctgaagcatcatctgccagggagaggg

SEQ ID NO: 43041 - DNA, 1053 bp, Artificial sequence
  DNA replication origin
ccgccgccaccgcactggaccaaagatggcggcgcgtcggccgtcgcccgacccctccgccgcgtcaaagagtcccgcctcttcccgcgccccgccgcaaccggcaggggccaccgcctccccggctcgcctcccgggagggctgccagggcccgggccacagcaccagcgcggctccgcgggcgacgctgctcgccgagagtctagagaggcgcggggcggggcgggcggggcgggccggcggccggtgctgcggcccaggaagaatccgtgcgcgggagccgcgcgcgccccgccccacccgccgcgccccgccccgccccgccccgcgcgcgcccgcccacctccccacccccgcccacccccccgggagtctcggcgcggccccgcggccgggcgcgcgccgctgcggcagcctggggcggccccctcacgacgcgaaggctgccattgtcacgacggcctcctgagacgccgaagcgcaccgggactcggcccgaccgcccctccctaccctgagcggttagggcccagcttgctaaagcccctcccggtctccgcggatgcctcttcgcctccccctcgccaggctccatcctcccgcatccctccggcgagcacgcgcctaaagcccagcgcagaaatgagcgacaagaggcccaacgcatggcgacccgcgtttattttattaggaaggaaacaaccaagcaccccatgctcctgcccggcactcccggtgggaacatgccaaacagccggcgatcgcacccagcccacctgtcgtggaggtcccttccttctcaggccacagaaataaacccgtgtacttcttattgttagcacaacatcaccagaaaacgataacgacagccaagcaggacagacagttaagtagtacttccacactcccaaactcagggagccctataaccttaaggagggagcatttgctacacaaaagcactatccacagccagggatgatgtagccacaagaataaataaggagaaaggagaccctagaattcatgtcccttacgcctcacagcgacga

SEQ ID NO: 43042 - DNA, 1121 bp, Artificial sequence
  DNA replication origin
aaaacgcttatacagctgtaagcagaagggagagagagagacacctcagggaccacctcctcctgctccaggcacctggggagctacttccaccctgtgccgctatgtgggaggttaacagggataggcttgggcctgggcagcctcacctcctccaggggtgtgatggaggagctctcgcccccgtagtaggggttccggtccatgtgcagcaccttcttcccgttcacagacatgatgcccgacaggatgcattcctgggggagggtgacaccatccgctgcactcccacctgcctccgctcctaccagcagacctgatttgttccccacccaaacctgcctcagtggacagctccttccacccaccatccccactggctagttgcctcgcctaaaattggggtgatggcttcatccgaccacactctccattgcaaccttgctgggcaaaggagtcccgtccccctcacaaggcggagagtgaaataacggaggctttgagggaggcagggcatccagcagacacaggatggccttccagtaccaacacgccgagaggcatctacctacgcagagccgcacaaaaaggcggataaaacacaataaggcacagagaagacccagctggactgcaaaggacactcgaaagggaggaaaagaaaggcttagcacagtccttgaaattgtaggccccaccctggactgctctttcttcaaatagcaggagcccctgccgctgaggaggggcatctgggcctggaccgaggaagaagagtctctgaggggagtaggccaacggggttttcggggaaagggggaagataaacaccctcaccagtcactgtcactagcccaaggacaaaggctgcagatgctacccagcctgaggtctccatgggcaaccgaggtggggttgcgggaatgtgcttactgcccccactgctgttccttctggaacattccctggatcccctggccccagaagacgatgaggaggcgggctgagggcccactctggcgaggccccctgaccccaggtccttctacttcatccccaccgggattagcgcaagatgggaacggacgctgagaggcaacgctaggcgggcaatgggtgcg

SEQ ID NO: 43043 - DNA, 1242 bp, Artificial sequence
  DNA replication origin
agggctccagcatcctctgcttcccccaccacgttcccatcacccacctcattgatccactgaccaaatccttaaccctagcgatggcttgggagatggggggttggatagcatcctctttcttggcccttccttatcctaggaaaagagggttcctctccttgtgtgtgtctcttccccccacccctaattcttctgctctgtttgggaagacgtggaggaaaaggtgacttctgcccccaccgctcttacccccactgtagtggcctttggagatgcccccacctcccccccaccaactctcgcgtgttggagagaaggggccctcccagcacaaagttgcattcctcccccctaatttattctaatttattaactttgacccaccctttctgagcctgcagccttcccgtgtggcctgagggctgtcgagtgagctgccccagcccctcccagcccttgcccagcctgggggagtggggaaggcttgggcatggccccgttggaggttgatttgctgttttgtttcttgtctttgtgttctgtggtacttgctgagagaaaagaaaagtgagccaagcagaaggaggtgggaaaacggacccaaaccccagtgtgccctgccccatgcctttcctttagtggtgggaaacccttatcttgcaaagtgaatgtgtccccttccccaccctctagtgtatttcacagaaaacaaaacctcccaataaaacggttgaaacctgaatctctggatcttgatggttatctcccaaaagctgggtacctggcagggctttggctgcctgggttggggctctggcttagcttcactctggactgtaaaaggtggcattcttcaccagggaattcctcacccagagcacgctggggccaaattgacttaaagcttaaggctacccagtgagtcgatgctggcaccaggactgcagccctcagtgctcaatgcagggggagtgtggtggagggcgggtgtcaacgtggaggaagcagagggagcgggggtcctggcctctggcttgaaaggagagggcagaggggaccaggggccagcctcggatgggattctaagtgaagcagggagacgggtgccagttttcggcttaatgcgggggaactagggcagccaggggaccagcgttggggtcaccaggaggaattagagggaccggggcccagccttggctcgggttaacgtcgaggcagcgcgaggggctggggaat

SEQ ID NO: 43044 - DNA, 1294 bp, Artificial sequence
  DNA replication origin
tcggagcatgcgcgctgcccaggtccccggcggccccgcgccacgctccggccctggaagccctggggcggtggccacggagcgcgggcggcgcgccggggcaggcccctggctcgctgacttccagcagggcacacagaagcaagccagcgacagtctcatctgtgaaatgggcctggagccgggcgttctccgaggctgaggccactagctgatgaccggcctccggcaggagggagccgagccagtgtttctgttgggaggcacggcggggacgggcctctcgtcgcctcgcctgggcacccagcgtcctggctctggcccctcggccctcagagccaggcctctgccccctcggccctcagagccaggcctctgccctggtcctatggacaccgggcagggcggttcgtctccccctggagaggcggggaggcctgagccagacctggcaagtccactggccaggaggctccttccagaaccccttgcacctgtgaggcaggcacgaccctcccgggtgccagcggttcacccactgcttccgtgagtggcctgtgatggtggtggtcagggaaggagcgtggaggagcttgatccttttggggagactcactcatcaggactcggggctccaggggagagcaggctcctgcctggggaactggggaagcctggccagaggagccttgaaacaccaagtcctcatgccctggccgcactgtctgagccggggtgcccagcaagcagaaggtgtatttctctgccagccaccttcttgggagaccactggtcagcgagggcttgacatggtaccaagtgggttggggctggggccaaagagaggcctcctgggaagctgttgatgacattctggggcctggagggaggaaaatcactcagggaggggccaggcccctcaaccactctgttcttgtttgccctctcctcataacccttggcttgggtctcggaagcttcagcttaaaggctggagatgaaaaaggccaaaggtcagtagggtcggtggcttcaggctactgagggacctgtgatccccagcaggagacctgaagagccagagcagctcagggatggaaacagccccatttggcactcttagcatttgaagagccctgcccagcctcatggaaccttccatcgacaagggcacaggggcagatttggactataacgcaggtccttgatggccagcctgccatttccacagtgaggggtggttctcatggtggctgtcactccccgcaggagaacatcatgaaatccaacattg

SEQ ID NO: 43045 - DNA, 943 bp, Artificial sequence
  DNA replication origin
cccttggcttgggtctcggaagcttcagcttaaaggctggagatgaaaaaggccaaaggtcagtagggtcggtggcttcaggctactgagggacctgtgatccccagcaggagacctgaagagccagagcagctcagggatggaaacagccccatttggcactcttagcatttgaagagccctgcccagcctcatggaaccttccatcgacaagggcacaggggcagatttggactataacgcaggtccttgatggccagcctgccatttccacagtgaggggtggttctcatggtggctgtcactccccgcaggagaacatcatgaaatccaacattgacaagaagttctctgcgcactacgacgcggtggaggcagagctcaagtccagcaccgtgggtgagcagggtgcgggtgcccctcacccgggccccgggccactcttccgctggccctgcgactaccttgccccttgtgcctccttgcttcaaaggtctcgtgaccctgaatgacatgaaggccaagcaggaggctctggtgaaggagcgggagaagcagctggccaagaaggagcagtccaaggagctgcagatgtgggtcctctcgccgcagccctcaacatggagctagtgcttacggggtcccgtggctggtcgggctctttttgcaccctgggggggaccctgtctccagctttgggacaggggtagcatctagcttgcgatttgcatttctctctcccgcctcctcgggtccacgctcacgtcttttcaccatggcggcttgtcttctttctgaccctctaaatgcagtgggccctttcccagcatccggtgcctgagcagcctgcgttctccccattgccagcctgtgcttggctctcccctgtggccctctgtgcttgctgtttgtaacagagccctcgcccatgagctcaaagtga

SEQ ID NO: 43046 - DNA, 971 bp, Artificial sequence
  DNA replication origin
gtcagcaaagctgatgccctgtcaagatggctccaaaagctgccctcttgaggcaccgcgcacagtagaccggggagggaagaggctggtctagaccaggctggctgggcacattttctgtgatgatggaaatgttagagtctgtgccacccaatatggtagccacttgccccaggtgcctcgtatgactggggcactaaatggtgaattctgtttgatttgtttcagcgtaaatgtatacagccacagaaattccgaggctactagtcagacactgcaggtctcagctgtgagaacaaggggctgtcagggaaagctcaggatggctggggagtgagggtaaagccagcctggcctccacgtgtgccacacacctgtgctgtgcctggccagggcacatagggtgctgtccctctcctggtggaagtcacgggtcaccatgcactgaagacactactcagggttactgctctgcttggggcccaccgggctaacccaggggtcaaggaaggaggggagggttgagttaggccctaaggatgaggggagttgcattcgccagagaggcaggaggggcgacgagaaagtacatgccagaagcccagcaggaaagagcttttcaaaacgtttgaagattgggagcaagttgtgtcacgggcccctggagggtgtggtggcagttctggaaattgtgtcacccagggaatggcagagggagagaagcgaggcaggggatggtgctgtgtggctgtggtaacaggctgggtgccatggctttgaggggagtgcaggattgtagggaggaagaacctgccagccacctgccatttgggttccatgttccagcagccacagtaaaacatagaaaaagaaacaagcaggattttagtatgacattgtatttaacccagcgtatccaaaatatcaccattgcggcaggcgcactagctgcaatgctggggtgctgtgtg

SEQ ID NO: 43047 - DNA, 3047 bp, Artificial sequence
  DNA replication origin
gtggggcactgggcagcccagagagaggcaaggagagggcagggacccctgggagggagaaacaggtgggagggcaaaggtgccactcccagggccatggcaaagcctgggacaggatgactggccgtgagcccacgctgggcatggtagacctgggacagggcagaggaccagtgtggggtgatgaggggctcacggtgttgatgcagggcagctccttgttcagcagccagggcagagccagagtgccctccccacgatagcaggactggatgcggcgccggatgtgggcattgatgttgctgagggtgaagaggcagaggatggtctgccggggtgggctggcccggttcttctggccctgagagaagatggtgaagaggacgtcctcatcagccggcacgcccagggcctgggccagcagcaggccaggcttggccaggtgggcgctctgcaccaagcggtactccacgccgcgccaggagcagccgatggggaattccacgtatgagtagaactctgagtctcccgcgcacatgcgcacgatcttggacgtgaaaaatttctcgcccgctgtgtccaacagcgtctgctgggtgtccagctgcagcgtcaggaagtacacgaaggaggcgctgacgaagccgtagatgtagtagatgtcaaaggcagggtacaaggacagcgtgtctgaggggatcttgatctgggaggacacaaactcatcctggtacacctggggagcagggggaggagacagcatccggtgaggccctgtgccaacatcacgggccaccgccagcttccctctgcatccccctcccgcctggatgatcacagaggcccaggccagaaaggctgcagagggcagggtgaccagcctccctgcacacaggggacccccgcaacctgggttcaggctgtcatcccaccctccgcaacctgtctgcatcccagacactgaggagccgaaagtcccctctcagaaagaacagggctcttctgggaggcagagccaggactgggtggaggaagaagagaaggaaggctcacgcacgagactgaacatgtccgcgctgtcttcatcactgatgagcttgcgggagctcaaggtggggaagtactccgacttgccgtcgacagcagtgcccacaaacagcttgctgggcccctggccctgctccacaatgacaccagccatggagtcgggctcctgggcccccgacaggtagtgctccttgcggtggtgcggctcacccagcttgaagaggtcgtccagacgcaggaactggcagatgccctgccagatgctgccgcaggccaccaggcggcgggccgcatagtctatgagcagcagcttgttgatgttgtccacgggggccaggcggtgggcacacacgcgcatgctggggggcgggtagcagcgagcgttgtcctcgacgggccccgtgacatgggcccgcagctcagtcaggttgggggccagcttaaagactcggttcactgcgcccacgaacacctccccagtcacccggtgcacagccaggtgggtaagcgtggtgtctgtcaccacgaaggcacggaagggcctgttgcccagggccccccccacggcaaggaagagcagcaggaggaggcagacagagggcatggccggcagccgcgcctggggacaggcctagggagagacggtgtgtgggagtcagaggcctcgagccacagagggctgggccattcacccaccaccccgccaaagccccagatggccaccgtgacagggagagaggaggggcctccgccagggcgcatgagtgagcagccagcgagggcaggcttgggggccatcaatcgtccctcagcccccatgctggaaaggagccaggaggcctcgcctcagctgggccacacccaagggggtagcagagcagatgctggaactgggaccccagatgccacatctcagagcccggggcaaccaacagcaaagaacagcaagccccaggcctctgggctgcccccaacgcctgagctgaggggagagggaggcaggcacagaataatcgcaagctgggggagaggggcagggccaggaacaccacctggagtggcactgccaccaggagccctgggacagaggtctggggaatggaggcctgatgcaggatccagcaccaccatgtcccctgcaggggccccagctgcctccccgacaagggcctcagctggccatccaggagcccgctgtctggcctccccgatgcaacacaaagccaagtcgcgcctgcccctcagccacgcacccagacacacatcagtcaagctctgctcagccacagcctgcatggctccccctccagacccaggggttcactggagaagggaatgtacagggggccctacctgccctttggagtcccaggagccttacaagaggaggagcaatgtccccaaatacagtcaaggccttggagagacagggcaggagccacagggacagtgctgggactggcacttagtccccaggccacacccagtcagccccaggctgctaagacagcagagcagtgtcgtggcagccaacagggcagggctcagcgctaccctctcagtgccagagctcccgggggagataggaggtacccagcttgagggcgggaggcggggggggagcggggggtggtgcagggaaccaaaccaaggaggcacaggagagagaaaggaaaaataaggcatttgccaggaacaagcagcgggcccagcttgaaactgcaaagtttcagctcagattgatcacctctccagggctcttttgtcagctggacccctcatgcaacagccggagaagaaaggaaggccaaagaaaagagaggccacatcctgtcttcacctcctctacaccccgggaacacaagcctaggaacaggctggggacaggtcgggagggagacctggggaggcagtttcaggcccagcccccacctgtaagtggcaacctcgggcatcacaggtacagctgggccagcagagagcctgaggaaggggcagcc

SEQ ID NO: 43048 - DNA, 1417 bp, Artificial sequence
  DNA replication origin
ctcctcagcaaagccgtgtggggcagaggcgcccagacaggccccttcgcggcagcacctgcacggggtcgggccagagccggtcccgccactgccccgggagggcccaggcctgtccagctcacagtgccaggcaacagcgagccttggccgcgtcccctggggcccgagggacgtcactcggggtggaggttccactcattagctggagaaagtggaggagggcggggggaggccgcaagggcacggctgggtgtggctggctccccctggccagtggggccctccaactccccgagcaggggtccccgccctcacctgtgtcgcagcacacaccaaccacagtgcgggtccccggagcccaggcaggctgcgcagctctggtactgctcacaggtctccaccgggagctggctcacctggggacagccacatcagcacccagcccacccccgccccaccacccaccgccacccaccacaggcccacctgcttctcactcaggagatagatgtgccggtggtccgggctgaagagcaggtctcggaggatggggctgccatccaccacggggactgtctcatacaggtgggcatcctggaagccatcgacccgcacctgagccacaagaccagcctgatgccaccacagcctcctgcacctgggacactgtcttctccagccaaagactttggaggttgtggctgagctgacgtcaggacctggtggggttcagcactcacacccacagcccggaggccaaaaaaaggagggtgcagacgccagaaaatgccctcagcaaacagaaggacggagtgattcgtgttgcccaaggtcaggggatgcaggggaggggaagagctagaagatggcattgattaggagaatgaggtagtggcgatggttgtgccactctgcagatccacagaaacccactgaactgtgcactttaaaatgggtgaattggatagtacgcgttcaacaaagctgctacaaaggaaaagagggtcccaggaacagagcaggtgggccaggagagttcatcatccttctccacaaacccttccctgcgcccccagaccaacacttgccctcctgggggatggcactgcatctacgaggcaagcaggatgagagcactgcagtcccccgactcctacctattcaacacgtacctgagtgcccagaagttcatctcccccttcatgccaagctacccccagatccccaatggaagcagcttcagcccccgggcccatgggtaggaggggaaggatgggaagtagtgagccaaggagagggcaggggcaagtgggtctgtcccaggcatagggaggcttgaggggcaaggcatttgctcccttgttcattcaacagaggacccagcaatgctggctcagccccaggcctgctctcg

SEQ ID NO: 43049 - DNA, 1097 bp, Artificial sequence
  DNA replication origin
ggggaggagccgggccgggctgctccacacgccccttgcgggagagagaagggacaggaaggggtagggccggcagccacgcaccacaaagctgtagacctgctccgactgcgtgcggaagtcggctgaacagtcacccacacacagctccacgggccccggcggcgggctgggcaccagcgactcctccatctcacacacgatcctagggctcagagagcgtcagggccggccaggccacatacggcccgggcacccacagagccgcactcacctctcagcactgatgtactcggccggaatggagttgcaacgcacgccagccacccgcaggcccacctctcgggacaagaggcccaggttctcacccacgatggtgacccgggtgcctccttccttgggccccacgagagggtggatctgtggagcaggatgggcagtgagagagttggctcagactcccaggggccctgttggcagtgggcaggggcggtgagggaggctgacctgcgtgatgcgggggtggctgcaccgggtgcccttctggctcaggtgcatccagttggtcttcggggccgggcagtgggtccgcagctggcacctgtgctctgagatgcaccagccacagttgaagcggggatcagccttgaggcagaggccacagctgggccgctgcgcccagcacttgtacaggagggctgcaggcacagaaggcactgctgacggagcaggcagtggcagaaaagtggaaagtggggagcactagggcccccagacccgaccccagcagtgccaattgccttaggagggaagctccctggcccatgccttcacctcggaagctgggaggcttgtctatggggaagtctccatcccagaccacggaaaagtccagctcggtgtcaccatgctcatcaccttcataggagtactggaggaaaggaacccatgggaccccagataagatgtgcagaacccctacccaagatttttgccagctgcccccctcctccaggtacaggaatccctagcaggagactcagacagttccctgccagagagctgggcatagacaagaacgatccacaccacgccac

SEQ ID NO: 43050 - DNA, 893 bp, Artificial sequence
  DNA replication origin
gctggctgcctgcctgaccactggccggtcctctgccaccacctccctgccgcccacccacctggcgcaccttcagaaacttatgcagcaggaacgtgaaccagttggtaagcatcttctcagccactgactctgtcctagggcaagagaagggggctcgggcctggcaggggtggggcttggacagggggcaggcccaggcaggacaaaggtgtggcctggatagagcaaggcaggtacctgcgtagcagcagcttggggtggttcttgctctcgaggttcttctcgatgaggtcggccagcagttgcttgagcagccccgtggcatagtcgagccggctctgcagggccaccatggtgagcgaggccacggtgccgcggtcgcgcatggagaagctgctctgggcctccagcgtgtggatgaaggtaagcacgaacgcgcggctgtgcagcagctgcccgaagaggcgcagggccttctccacgttgggtggcgtctgtggggagcaggaggtctcagagggtgggggcggccctgaagggaatggtggggggcaggccaggcagaggctcacatccagctccttgagcaccgggtgggcctcgatgcccgggaagagcacgcgcacggcgtaagtccggtagtccaggaaggggatctgcacctcgtccatgtggttagtcagctcattgatgtccgtctgcagctctgcaaaagctggggggtggagagagggaatgagtgggcaggagggaggtccccagcttccacaccacatcccgccccgcctcaggcaccttccttgcactccagggccacacgggactccaggttgtccatctgcagctgcagacgcttgagggtacggtccgcgtcctgagtcttgcgcttg

SEQ ID NO: 43051 - DNA, 1378 bp, Artificial sequence
  DNA replication origin
ttgcaccagcgctctggaatcgagttacgcgcgaaagggcagagtttctggaggaaaccgcagcctctcaaccgctgaccgggtctcagaaggcccccggcagggccgcttggcgggaactgaccacgcgccagtcaggctctccagggacctgcgcaggcgcgtgtgggcggagtcgtgcgcagggggcggggcttcgggaaggagccacagagagggcggggcgtaggacctgcgcttcgggggtggagtcggagcggcgcggcggcggtcatgcgggacgcggatgcagacgcaggcggaggcgctgacggcggggatggccggggtggccacagctgccgcgggggcgtggacacagccgcagctccggccggtggagctcccccagcgcacgcgccaggtccgggcagagacgccgcgtctgcggccagggggtcacgaatgcggccgcacatattgtatcctttccgagctgggggctgcttgcggcggagcgagggctggactcggggagaaggaaaggagggcgggcggggggccgacggaaagggtagcagggggggaccggggctggcgtatacggtcagaggtggtcggaggaggggaagacattgaaatggagggagaagctctgctaacggtggcctgggcgaggtaaggagtgaagggggtgacactaggcagggtgacctgagagggggcttcagaggagcaagaaggcctgagacataggcaagatcgtatcagatggcaccttaaccgaatgacccccagcaccctcagcgtgcctttcccgacccccttggaggcggaaatcgcccatgggtccctggcaccagatgccgagccccaccaaagggtggttgggaaggatctcacagtgagtggcaggatcctggtcgtgtaagttctgaaagggacggggttgggggaggcggcccatggagacatgggggacatccaaggatgagccctaaggagcgccaggtgcgctgggccggtctctgcctgaggggctgtgtaatggcagggctcccaagggtttgctatattgggtgcctgaggggcagagcgagggaccaggagttgccacctccaatttgattttcttttcccctcacttttagccgctggaaagctgaagactgtcgcctgctccgaatttccgtcatcaactttcttgaccagctttccctggtggtgcggaccatgcagcgctttgggccccccgtttcccgctaagcctggcctgggcaaatggagcgaggtcccactttgcgtctccttgtaggcagtgcgtccatccttccctagggcaggaattcccacagttgctactttcctgggagggcctcatgttttatctggttcttaa

SEQ ID NO: 43052 - DNA, 2135 bp, Artificial sequence
  DNA replication origin
gacactgggtgaaattgctcacctgctgccaatgccaataccactggacttttcactttcataagccaagaaatttccgttaactgattaaacaaattgcctttattgttaaaccaatgattggatatcagaaacagcctagctaatatagctccttttggataaaagtagaagcctcacattcacctttaatgttatttcactttttccaaaatcaatttcctggcaccacacaaacaagaacactggtaaatgtatcacctgaactgcaggccacacatgctcacgagtgtgtccctgccgtaggtggctttgaagccatatacatggctctccagctctcgtggggggccaggggcttctgtgtgctcttcaaagccttcacccattgggcctctgtccatctttccagcctggggacccaatatttgccccacaaggcccaggcaggagggcctccagcacgcgcagccctgaccacactgtgagcagctcacttggcaagggtgaagggccggagtggcgtcctcctgatgtggcttccttccagcctctaccacccctgggggcctcctccaaggagcaggtggttagatgtcctcttgtgcccacacacacggcagggtggaggaggatgaaccggaacccagtccatgcttctgcccccaccctggcaccccaaggtttcttctcaggcaacaaggagcacacaaagtgagcccctgtacacaggtggctgggatatgttcatcttccacagggaggccagtgctggggatgaggacaaaggcctacgcccagtcccagctctgacactgccttgctgagtcacccatcagccctaacgcttcctggacgagacaagcagatagggtgccccagagaggagctgtgtcactaagggccaggacaccccatctctgggtcacacttggccacggcttcatttttggcttcagtttgtttactgaacagaagggagaggggccctgtgagacagaggacactgactcaggtcggtgagtggccctcactgtatagagtccatggctggggaccaagtggcactgagactcgcccaaagtcacatcacagagctggggtgccttgctgactccctggccccaatctgcttttccatttgtcgaacgcacactggcacactggctgcagcagctgcgggggtcggggggttccagggctggctgtcacttggcctcctgcagaggtaagctgagggctatgttggacccgccagaagtcaggtgacagctgctttccctttcaggatcgggagggagtcacctgagggtatattctcagtgggctaaacatgacatgcgagagcccagctctccaagcggccccttcctccttctcacaccaaggcactttcagaagccgctggattccgactggggctgtgccacttcatcgccggtgcctctgctgtgccggctctcctcttctgagggtgtggaagcaaacccaggtcaagctgtgaggagtgcctagcacctggccagagccaggtacatgccagctatgatgatgatgagcccaactgcaacaggagaacacacttagtgcgacatgcagcggtagcctggcgttgggcacctccccatgctccgagaattctatttggagaagcccttctccattgtctcagtcacttcagggtgcaggaagcggctggccaaccgttcgatgtcgtccagcgtcaggcgactcagggacctctcgtaatcctggggagagaagggcaggaagattcaggggctgccagtggtgggggggcatacactgcaacagaggtaggggctgggagcaactgggcctgaagaggatgcccagggttacccttctcaccctctgtagctgttccaggaccctgctggcatctgccgcactgaagtggcgggccaagactttggagatcagctgccagacctgcgggggtggggagtcggccagcctctgggcctcgccttcttctagtagcaccttctccaggggtttgaccactaggttgagcttggagttgggcccgatgctataatccgagagtcgtttcccatctgccaaagacagatcgatgggttcctcctcctccaccgccgtgggggtggccc

SEQ ID NO: 43053 - DNA, 4029 bp, Artificial sequence
  DNA replication origin
agggttgagcccgcggcccccagacggcgaagcccacgcgtccgcccccgagggcagctctcccggctcccggccctcggcccggccgccccgtgcccgccctcggccctgccggtccccctgccaggagcgggcgagagagcgcgccggacccggcggcccggcccggggaccctacctgcaggctgcactcgcggccctgcagcgccttcaccgtcagctgcatggcggtcgcgacggcgtccactcgggccggcgcgcaccccaaccaccccccgccgcgcgccgccgccccgggcgcgcgctggaaccgcccgccgccgccggaagcagcgagaggggcgcgcccgccgcccgcgcttcccggccccgccctcctgccccgtccgcgccccggccccgccccccggcccaattgcgccccgggaggagtccccccggggtcccgcctagcatgcgcgcatcgaccgccctggccggcggacccctcccaaagcaacgacgcgggggagttgggagcaggaaccagtcgggccaggttggcgtcatctgggagctgggacatggagaagggagggccagaaggtacgctcgcccccgcggactgcctggcccacctcacgcgccaggactgctggcggcgcctggccctgcatacccacagacggcccgcccccgctccctgtctggtggcttcctacctcctcctttctggtctggctgcgaaacgctccactgagcttgagagggggcaggggggctacgcctctgccctcatcctcccacctctcccagagtggggacacccccggggagggctgatagggaaagcctatgcaggggtcaccgtgtcacccaagctggccctccaccctggtccacacttacccagcacactctttctacccccacgcccaggccccaaagggcaaagagtagaagggacccaagcttgcttctctcttttattgaaatatattttctgggcagcgcccacctacctaactcagcatggcctctttggcactgaaagctggagaataaaaaatcagtaaaaaaaataagcctggatttttctgagtgcatagtgcatgagaactttggtggagtgtgggggctggggctgatgaaagcttgacccagaggcctcagggaactgggaacaggctgctgtagatgaagtggccaatgaccaaggccagcatctcggaggtgccgctcagcgccacaatgaagggggcctgggaggcatagtcagcttgaaggcggcggagggatagctgcagcatggccaaggccagcaggctgttctgcacccctacctcaatgctgaccgtccgccgctgggccactggcagcttcagacacgtggctaggcagtagcccaccaacaggccaaccaggggcaccgtgatacccaccagtacgatgggtagccggatgcctgccaggatgaagacccccatgcgataggccaggaagaggccgcccaggaggagcacaaagctgaagggcttgacgacctgcagcagcagctgggagaacttggggagcttggacttgatcagcacgcccacggctatggggatggcaatgaacagcagggtccccaggatcttggagatgggcacgtggagcgtctcatggatgctgagcaggcggctgtagatggccgaagacagaggcaagaagccagtggcagccaccgtagagaggaaagtcatggagatggccagggtgacgtcccctccaagaaggaggctgaagaggtagctccccccgccgccaggcgacgagcaggtgatgatgaggcccagagccagggccttgggcagcatgaagaccttggccatgaggaaagcgtacaagggcatgaccagaaactggcccaggaggcccagcagcatgggctgggggctctgcatgagccccttcagaacctcgagttccactttgcacccaaacgaacacttgttgacaaagataagaggcaggagcaggtagaggattgggttttccgagaagtgggccaggtcggcgctgagggtggcaggcgtgtcttcagcaggtgagaccttgatgcagaagtctctccgctcctcaatcagtgtgggcggggcctcatgggcgtccacgagctggatgtggagtggggccagcccagccaggcctgagtggatgctcaccacaaagccacccccgcctccccaggttatagcactcacgttcttgatggtcagcacctctgtgtccagggaggtgaccctgagcatggggccaggcgccgtcctgttggcctggcctgggtactggctggagatcacgatgatgccctcactgtcctcaggaaactcaaactccatcacagagccatctccaatgctcaagtagcggcccccagtcggtggcacggtgtgacccccagcagtgctgaggctggtgctggctgtcccttgggccccccatggcaggctgatgagcagcagggcagctctgagcatgcttaagggacctgtgccaccaccctcgccccccagaccaggccactgctgagagctgcccttgtcctgcattaacaccatggctcttcctggaggacggatggcgtgcccaggccctctgcggcttaggagaacatccccactggtgctgttgggttgtcctgagaagggttcatgggtgggtcccagtcctgtgctgtcttccttgatggcagggctgtccctgaggaggtaagggacacagagaggcagctggtgagggtcacttaccctggaggccttggtccagccatgtgtcttacctctgaagagggaggcagtcaagaacccaggagcatggggatctggaagcccactgctaagagtaaaactcagcagggacccttgccccacactcaggaatggagaggcaatgcctagtgatggcccttgagtgccattcagctgtggctccctggcccactctacctgcccctacagtgactcgatgaaggtcctgctgggaagcaggtcctccctccccagggaagttgccagaaggggcggcaggagtggatcagacagagccacatgtctactgggggggtttctcctccttttgtcagagctcccactgggctgagactttgacctcccagagccactgcgttacatctgagaggctgtgctcagagtgcagggctccttcccatgcccacatgcgcccctaccagagcctcaaactcagtggaattatgagtgtttctagcggccagcaacacccccttccacttctcaatctgggcagcgaccaccgtagtgtcacatcacctgctagaactggggcaaccaggatggagacacaacagctttacatcacccctgtcagttgcctcatgcactgttgtgtcccagtcctagaagaggactgcctctatagatcctatccgtctttggcattggcctcccgtcatctgagactggggtgaggcagaagtagggagcagaggttaggttaagccaaaggctcatcccggcgagcctcccctatccctagcttaggatgacatggcctctgctggcttgaagttcgggtcacttaccctggaggccttggtccagccatgtgtcttacctctgaagagggaggcaggaaaaccagtggggtgggagaggcaaagtacaggagctaagatgaaggcaccaggactgaagccaccggggtgatacaaaccagctcagaagggaaaggctaggggccatccaccccatgccccatccctccagtagggctggcggctctgagtcactccaagaggggtttggcccagatcccacaccatttctgcttgaggggccgacagagtttgagcagatgcacccacaaggcaggggagggagtcccggcccttccaaaacggccaagtgttcggggtaactggcagtgctaacaggggctcctccctacctgggagtccggaagttgtcggacgggtggctagcagagctcgggcgcgaacctgggagggaggaaaggaagggcacgccg

SEQ ID NO: 43054 - DNA, 1211 bp, Artificial sequence
  DNA replication origin
ctccttcccaggcctccctgggagatcttgaatgggaggggaagggagggcaaacacccagaggcctcctggggagggagcagggaaggagggcggcaggccacgctcagccaggggcctcaccgttcaccagggcgatgttcagcccgcggcccacgttgtccttgacgctgctcatcagcctagttgggggggggtgggggggacggggagatcccacatgggcacgtctgctccactctcccttgcagacccggccctggatcccccactccctccctgatccccagtcaccccagggagctcacatcttgtcctcgaggcagatcttgggcccaatgacgttggcggccccgctgaccacgcggaaggccaggtgctcctcaggacacggctggggcaggccacacttgtacttcctggcccgtggcgctgggcagggatagcaggtgttatccatgggcctggccctgaggtcacctgagatctgaaggggaggtcaggaccagcacacatggtagaacaagtgaccgcagagcaggacacaagtagggggatgtggctcaggccgaggctggggacacttccatactctgtgtcctactggtgaggccacagggacccaagacagaaggattttctgttactggtgggagaaaagaaaggatgctgagggctggcctgggccactgcacagccaggaacaaagcaggggtgaagtaagtcaggctgggggtctagctgcatggatgaggccaacctgagcaaaggcagtgtggcagggggtagtgtggcagggggtgcagcctgtctcccgattttgatgggggttggttgggaggactggagcaggatggcttctattatgggttgaattctgtcccctcaaggtatgctgaagttctaatctgtggtacttcagaatgtgatgtttgcaaatagggcctttgcagttcagatggggtcatactggagtaggttgggtccttaatgcaacatgactgatgtccttataagaacagaagtgacaaagacacacagagggaagacagccatggtacagtggaggaagagacaggagtgacacagccagaggccaaggtatgcctggggccactggaacctggggaggtcaggaaggaccctcctgtagaactttcagggtgagtaacgccctgctgacactttgatttcagacttctggctttcag

SEQ ID NO: 43055 - DNA, 1050 bp, Artificial sequence
  DNA replication origin
gattttgatgggggttggttgggaggactggagcaggatggcttctattatgggttgaattctgtcccctcaaggtatgctgaagttctaatctgtggtacttcagaatgtgatgtttgcaaatagggcctttgcagttcagatggggtcatactggagtaggttgggtccttaatgcaacatgactgatgtccttataagaacagaagtgacaaagacacacagagggaagacagccatggtacagtggaggaagagacaggagtgacacagccagaggccaaggtatgcctggggccactggaacctggggaggtcaggaaggaccctcctgtagaactttcagggtgagtaacgccctgctgacactttgatttcagacttctggctttcagaatggggagagaatccatttctgttgtttaagccacccagttgaaatggcagttccaggaaatggatacaggttttggcaccaggaagtgtggtgcttaggtaacaaatacctaaaaatgtggaaatggctttggaactgggtagtcagtagaggcttgtcttagtccatttgctgctgccataacagaataccacagactgggtaatttataaagacaacagattcatttggctcatggttctggaggctgggaagtccaaaagcatggcgccggcatctggtgagggtcatcccgtggcagaaaggtggaaggtggaagcaagcatatgagacgcaggaaaaaagggggctgaacttcaaggtaactaactcacccataatagtggcattcatccattcatgagggcagagccctcatgacgtaactacctcaaaaaggccctcctctcaataccaatacattgacaaatttcaacatgagttttagagatgacatttaaaccatatcaaggctatagaagtttgaggtacatgttagaaaaggtctggattgcctttaagagactgttggtaggagtatggatgttaaaggtaattctggtgagaggaggggagagcaatagagacagcctctgtggtcttagagaatacaa

SEQ ID NO: 43056 - DNA, 1134 bp, Artificial sequence
  DNA replication origin
taggggaaagaggatggggatgtggttttgaagaagagtgttttctttgcttccttaacattggagatgttgaaaatacaggagaaagagcgaactagagagagtgatcactattacaagaaatcagagaaggctggggagcttgcaatccaggtcccagcagatgacgggactgttgttgttttggttttgttttgttttgtttttgtttttgttttgaggcagagtctcactctgtcgccaggctggagtgcagtggcatggtctcagctaactgcaacctccgccacccaggttcaactgattctcctgcttcagcctcctgagtagctgggattacaggtgcgcgccaccatgcccggctaatttttgtattttctgtagaggcagggtttcaccatctttgtcaggctggtctcgaacacctgacctcatgatctacccgcctcggcctcctaaagttctgggattacaggcgtgagccactgcgcccggccgggactggtcttaaaagggagtagggacccttctccctcagaacaggaggaaagcaggggcaggtggatgcccaaatatattggtggtttcagaggcaggaagttgagggggttcttggaaagagggctggagcccttctcgagcagagagttctggaaggccccctcccagacccgccagggaaaaccaaacccagcagccttgggatttgaactcaatttcctccttccacctgccagggagctcaagtctccctttcagccctggtagaaggcaacaggtctccacctccttgtcctccagccacttcttcccaagtggcaggggagatccagtcatgcaaggctatggggtcattctggggttcgctggtatctgaggtgaccccaccctgtgtctatcctgcctccaggccctctccgcattgtggtcctagtcgtcagtgtgggtgtcacatggatcgtggtcagcatcctcctgggtgggcctggcagtggctttcctcgcatccagcaactcttcaccagtgagtgtgggaccccgccttatccttctctggaggccaccaaggtggccacctgggcctgtggttgaggctctgggttgggagttgacttgggttttctatctcctccc

SEQ ID NO: 43057 - DNA, 1039 bp, Artificial sequence
  DNA replication origin
ggtctggagatcaagaccatcctggctaacatggtgaaaccccgtctttactaaaaatacaaaaaaattagccgggcgtggtggcgggcgcctgtagtcccagctaccagggaggctgaggcaggagaatggcgtgtaaccgggaggcggagcttgcagtgagccaagatcacgccactgcacttcagtctgggcaacagagcaagactctgtctcaaaaaaaaaaattagccaggcacggtggtgcgcgcctgtaatcccagctacttgggaggctgaggcaggagaatcgcttgaacccaggaggcggaggttgcagtgagccgacatcgcgccattgcactccagcctggggggcaagagcaagactccgtctcaaaaataaaaaaaataaaaagacactacaggtagggaccagaaggcagcctgagatgggagcctgggaaagtccagcttttaaggggagggtagaggagacgatctaactaaggagaatgaggagtgtccagagagattgggtcaggagagtgtgctgtccggaaagccagcagagaagttagtgcttctgtcaggtggacatgggcagcccactgagaggtcaaggaagatcaaggctgacaggtcaccaggggtggtgacaccacaaaggtcatcagtggccttggcaacaagctgatttggtgaggtggtggaagccaggccagactggagtagggtgggagggagtaggaggtgagatgatggaatgagtatagatgacttttgagggggttgacagggaaaagaaaggttaggggaaagaggatggggatgtggttttgaagaagagtgttttctttgcttccttaacattggagatgttgaaaatacaggagaaagagcgaactagagagagtgatcactattacaagaaatcagagaaggctggggagcttgcaatccaggtcccagcagatgacgggactgttgttgttttggttttgttttgttttgtttttgtttttgttttgaggcagagtctcactctgtcgccaggctg

SEQ ID NO: 43058 - DNA, 1437 bp, Artificial sequence
  DNA replication origin
aagcctgggtaggcagggctctcccacccgagaaagggccgaggggagacttccggggcgggaccgacgtgggcccctcccactcggcggccggtgggttcagcctgaacgcactgcggaggtggggccgacgagggatccaggggcgggacaggttcggggcgggacaggttcaggcccctcccatgcggcggccagcgcgagcggtagaggcgggtctggaggcggggcctgcgtggagccagacggcgcagctgctgccgggggcggggccggcgggctgtggccccgcccttagccgccattgccgggcctgcctggccaccctgcgcagcggccttgcgtcctctcccggggcggagcgggtcggcgggcctgacagggaacctccctgaccgagcccacgtctccccacggccagagaaatctccggcccggcccgcatcgccagcccccaggcccggaggaacggcccgagcccaggagaaccacatcttcgtcccagccccggaggctcctgtgggcaagatcgtgagccaacgggttcctgaggcccctcctggccaggcagggtttccccgcgcgtttccgaggagccctgcctggccgggcggctggacaaacaggtcgtagcaccgatcgcgcccgcccccagcaggggtcccgcacaggcttgcccctgacccccacccaaacctgtccttccgctttgcccccaaacagtgcacttgccggcggtcccaacccagcaggagaagtggacatgaggttggcaggtgggtggcttccacagcgaacgggagggagttgaaaagggcacctggctggaggcccagcgtcgcgacatctgtgtctggagaggcccgggtgaaccactgggtttggttttggaaatggaggactctgcacaaacactcgttccttgaccttaaccaaatcctttcacctctgaggacgtcagctccccgagctatgacatgaggattagtatagtcagtatctcccaacgcaggtagcagaccagctgctttttggaaaatgagtggtgagagagaggaggtgggcagtccaggtggagaggcgtggtcttagaggggaagtgacaaaagtggctgtgggcttcgacatgaacccgatgacagccctactgtcacctggacaagtaagatgaagatccttggggagggataggttggggctgggtggagagtagaaacaactcgggaattggacttcagacttgctaaggtggtaactttgtggacatatccaggtggagctggccactgaggaaccagctggcagggagtggtttcaagagaggccacggctggaactagaaaatagaaagtcattgacacatggtgcttaattaaagagctaggagtagatgacatcatctaaaaacacactacaggccgggcgcggtggctcacg

SEQ ID NO: 43059 - DNA, 908 bp, Artificial sequence
  DNA replication origin
cgggcctgggggctggcgatgcgggccgggccggagatttctctggccgtggggagacgtgggctcggtcagggaggttccctgtcaggcccgccgacccgctccgccccgggagaggacgcaaggccgctgcgcagggtggccaggcaggcccggcaatggcggctaagggcggggccacagcccgccggccccgcccccggcagcagctgcgccgtctggctccacgcaggccccgcctccagacccgcctctaccgctcgcgctggccgccgcatgggaggggcctgaacctgtcccgccccgaacctgtcccgcccctggatccctcgtcggccccacctccgcagtgcgttcaggctgaacccaccggccgccgagtgggaggggcccacgtcggtcccgccccggaagtctcccctcggccctttctcgggtgggagagccctgcctacccaggcttagagggctggggctgcgcttgcaccctgaggtcagatttgtgagtcgtgggaagacgcagatggatctggggcagaattagaacctgttccaaagttgatccatgcgctttgtaaaggcaagggaggtacagaggcgcagatagggaagaccgcaggatccagcgtgagcctctggctgcctttccttagggtctgttttctgtccagaagcgcgttcctgctgtctctcgttatcacttttataatgggacggggcgtctcaaactatttcgacatccttgaaaactcttgcctgctccgcctgcctggtctctaacaccctcctcctcagagctgctcaagctgtgttgtttacgccacaccccaccctaaaagcagaggagaatacaactttcgggggcagtggaggggggagtttagcgctataacccgaggctttcacag

SEQ ID NO: 43060 - DNA, 1372 bp, Artificial sequence
  DNA replication origin
agaggaggcgtggccacgctgccggcggaagtggagccctccgcgagcgcgcgaggccgccggggcaggcggggaaaccggacagtaggggcggggccgggccggcgatggggatgcgggagcactacgcggagctgcacccgtgcccgccggaattggggatgcagagcagcggcagcgggtatggcaggcagccggcgggccggcctccagcgcaggtgcccgagaggcaggggctggcctgggatgcgcgcgcacctgccctcgccccgccccgcccgcacgaggggtggtggccgaggccccgccccgcacgcctcgcctgaggcgggtccgctcagcccaggcgcccgcccccgcccccgccgattaaatgggccggcggggctcagcccccggaaacggtcgtacacttcggggctgcgagcgcggagggcgacgacgacgaagcgcaggtaaccggccgggcgggcgccgcgcaggcggaggagcgtactgtcccgcgctgcgccgcgcggcggtaaaatacacgctgtttgttgtgcttgagaaccgagcagaatcgagagggtcttaaccaatccctttataccccgcacctcctctcttgagcccctgagaccccgagagcgaaggggacttgccgaccggggtcacccagcttggcaaggggagggctggagctgaactccagcatctgcaccatctcccatgctccaggtcattgtggagttcccgctacagtcgggaatgagatggtcctgggcacgcagttccatgccccacaaggattttactcggttgtccagaattgatgctgtagtcggaatacaccaatgctttgagtaattttgtaatgtacaccctgaatgaaggctgcctaggagagagtggctggagcccagagccagcagtttctaacccatcaaccactccccaatgcccagccgttcacaaggagtgatttgggcaatcaggtgtcaccctggtgtgagaccccagaggaactctcaagaaaggggctaacttctcaatgctctcctgttcttctgccttgttaacgagcctttcttccaccagacagcgtcatggcagagcaggtggccctgagccggacccaggtgtgcgggatcctgcgggaagagcttttccagggcgatgccttccatcagtcggatacacacatattcatcatcatgggtgcatcggtgagtatctcccaggccccaatcttaaaagccaggaagtgcctgctccatgcctcagcttttccaactaattgttgcagggccccacaggctctgctaagttgagctcctcctcccgctcctgctagtgcgccaggatcatcccggctctacctggtgtgcat

SEQ ID NO: 43061 - DNA, 1567 bp, Artificial sequence
  DNA replication origin
gcgtgcggggcggggcctcggccaccacccctcgtgcgggcggggcggggcgagggcaggtgcgcgcgcatcccaggccagcccctgcctctcgggcacctgcgctggaggccggcccgccggctgcctgccatacccgctgccgctgctctgcatccccaattccggcgggcacgggtgcagctccgcgtagtgctcccgcatccccatcgccggcccggccccgcccctactgtccggtttccccgcctgccccggcggcctcgcgcgctcgcggagggctccacttccgccggcagcgtggccacgcctcctctgggctgtccctcggctcctgggcggggccttctgccgcgccactcccccgggaaccctcgcctgttcgcgggtcaagccggccctattgggcagtctcttcttgattcctcccccggagagggcggggcggccgagcgccccgaggctagacgccgccgtccgagagacgagggggcgtgtaggcggtgacgccctgcaaagtggccggcgtgcttatcattaccgagcttccgcgggcctgcagagcctggcggactcagacttctctccggagcgggatgcggccctaccgcggcctcacacttctcgccggcttcccgagttctcgggggcggggcttgtgtttttacttccggatcccacagctatgacaccggaagccggaagcgtggtagggaagggcgaccgcgaaactgggactttctcggagcgccggggccctaccagcgttcacagtccgccgctcccacccttctcacgtctgacggactctgctgacaggtgtggtccttttccccaaagacagggttccatccgtgggcgttccgccgcctccgaaacttcccccggacgttcaggctcccccctcttttttgggccccagcccgttcctgctccgcgcttctggagcactggccaaggcgggccgattcaggacccaggttacttgggcggcgagctggactgtttctactcctccctcctcctccactgcggggtctgaccctactccttgtgtgaggactcctctagttcagagacatattctgttcaccaaacttgactgcgctctatcgaggtcgttaaattcttcggaaatgcctcacatatagtttggcagctaggtatctgatttcatatgcctgtttgctcgttttgcaagacaacatctgcctatcgtcatactgtttctgtgatctgagaatgaatgggctctcctggcacattagaggaatagcacggaggtcactatagctggagcagagtgagggaggggagcacagttggagaggaagggatggggaacccgatggtacagggccttgtaggccgttgtagggagattggcttttacgcagaaggcaacggggatccatggtagggttctcagtagaggaggaatgtgatcggaattacgtcttacactgatcgttctagcagtggtggggagaacagaccatagtgggcaagggtaaaagaagggtggcgtggtaagaggtaattgcagtaatccagctcagagacagtg

SEQ ID NO: 43062 - DNA, 2358 bp, Artificial sequence
  DNA replication origin
gaaaaaaaaactacaaaaaaggccacgtgtggacacgcagtgaaacgtggtctggagagcagatggcatgactgtatcaaagacaaaccgggtgtcatcatggtcgcctctaccgttagcaaggctaagggacagaatgggcccacagccacaggcagaatctgaaggagtcctcagaaggcagaaagaaccatggacccgacacttctcagcctttcggctaagatcaagtgtagaaccacagaccctgcggtgcggccccgcccccgctgactcacttctcctccgaggcggcctggcgctccatgcggagcgcggcctccacgctctggccctgcatgcgcagctggtccacctgcacgctgtgctgctgctgcagcgcctcgcgctcactctccagctgccgcgcctgctcgctggccgcccgggccctggcacggggaaagagcagactcagggaggacgaacggggggacggcaggggctatgcgcagggcgtgggcggggggtgggggtcggctctgaacaccctgtgactgcgagctgatgccaggcggcagggtggaggcaccgtcaacagacacgaggacaactgcagggggccaggtgggagcagcaggtgaggagctttgcttaagacgtgtttgcttcaatgcaggggcccagcaggtgaccaagtacagatggcaaggagacctggaagccaggggaagggggtggtccgagaaaaggatggggtcgcctgcatcccgcagtgctggggccaggtgagaggagccctcggaactgcccgtggagttccactgggggactgctgggggccccagcaaaagcagtctcagtggagggggtcaggagagactgctgttccaaaaatgagagactgcccacctgggcgtgcaagcactgagctcaatgcagaccgggcctcggccccatccctgctgctgcccagagctctgctggagtcccagacgacctgctcggatgctcagttcccacacctgcccccctacagctcccttaacctccagtttccagggtctggcctcatcccaccacaccaagcccttccacagcctcactgcagggacaatggtgggtgcatctgtccaggtcctgggtggcctctggccacaggcagacacggcccttctccagtcaccccaactctgcctggcaggcctggctgcttggctctcccctccgcgcctgcctgcatactgcccccacaccctgcacgggttccctctgcccatcagagcctgggtcaagctcccctcccctctgccctgctggctgccccaagtgcaccttgaccgcctactgtgctgggatggctggggcccccctggcagctgatccatctgtctggagggcagaagcaggaccgaatgagaaccacagaaacctccctgccctttgacccaatggtcccactcacaagaaccaagacccctttgcaaaagagagtaaccagcaggcctgaggccaccggctggcaaggttggcccttggctggtgaagttcccttgccacagtgacactttctctagtggtcaggtcggtccctgcacctaggccatttgtaggaagaacgtggttgacgtgagcacccgctctgctgctgggagtcggggatttaggtacctgcctggcagagggcgctgacaggacctgcccccagtaaacacccagggcgctgagtctctagcgggcatccctgggcaggaacacggcccgtgtgggaggcgcttctcactgtgccgctcgcagggcagcgggaggctgggacagggcttctccaactccccccacggctcctgccctggcggctcctgccctgtgcctttttccctgtcatcaacctcagccacgagggcgactgtgcgccggtcccagaagtccttccagagaactagacactgtgggtgtgggctcggggcccccagaatgcctcctaaggaaataatccaaactccatcaaagggtcacagagtgcggagagccggctgggacccaggtcccggatgcctggcccagacctctcccgacgtctgccccgacgtctttacgcagcctgccccggtctatcctcatcaaggagcaccctggaggcccctaaacccacctcattgcttttggaaaccctggaaggggtctccggagccggctcccccgactcaccgaccctccagagcctggcattccttagtggcagcctccaagcgactctggctctcctgcagctccccgagcaaggacgtcacctgggctttcacagaggccttgtcctcagccatctgctgcaggataaaaagccacttcctgtcagcactgctttctccccagcggccc

SEQ ID NO: 43063 - DNA, 1588 bp, Artificial sequence
  DNA replication origin
ggttcctgtccttggcgtgccttttcagtctcctttaatctagaacagttcccctgcctttctgagctgtttgtgaagttcacagttttgaacagtgcagggtagttccattgtattattactattattttcaagacagggtcttgctctaccgtccaggctggagtgcagtggcataatctcggcttactgtaccttccgcctcttggtctcaagcgatcctcccaggtagctgggactataggcgcaggccagcacacctggctaatttttgcatttttggtagaggtggcgttttcctatgttgcccgggctggtcttgaactcctgagctcaagcgatcctcctgccttggcttctcaaagtgttgggattatgggcgtgagccaccgcgtctggccgcgattttattataaacattaaaaatactagcttttaggaaaacgatattaactgcctggtgaccagcccaccaaagcctgctttagagttgacggcctcaggagtcctcacacagccttggaagaccccattccaggcctgtgatgcgagggagggaaggaagggggtagagttggaagcaggcagcaccgtggctggactggcatgaggtggtttctccagcaaaagctccctttcctcaggaggaagctggcccagttgcaggtggcctatcaccagctcttccaagaatacgacaaccacatcaagagcagcgtggtgggcagtgagcggaagcgagtgagtgcgaccactggggctctagggctggccttgcctcttcctctccccgtggccctgaaccttgagaatgggtagacctgccttagacttgccttagacctgtgtcaggctgcagctgcgacagctcagggaagctgtggggagatggcaaccccaggatgttgctctcaggagtgtcagcaggccatcttaatggggggctgggccagagccttggggtgctccctctgtggggctggggacgtcttgtctccatggacattccctcttgccagccatcgccatctggcacctggctcagcttcccccaagccaaggtaagcccgacagcatttccaccccagtgttggctgggagccttttcctagtttgtcctcatcagacctaagctggggtgcagtttgctagtgatcacattttagcaggacaccgtcaatcgtaagtgtacccagaggagatttataaggacaaagcctgaagccaggtcacatggggaagagttagctacaaaactggccacttaatctctggaggggggcgttggtggggtgtgtctgtgtgtgtctcagggggctggagatgcctgcgtgggaggagtgcacctctgaccaggtggcagagtggaaggactgagggctctcagctgagctgtgcacatggcgggcacaggaccggctggctgtgagtgggtgtggcctgtggcctgtgaagggtgggaggagggctgtggagctggggattctgggaagggaatgtcggcccagctgggaggttgtaccagatgacctcagcggcctcttcagtcctgaaaaaaacctcagcatctcctctgtcgttttgggcc

SEQ ID NO: 43064 - DNA, 1912 bp, Artificial sequence
  DNA replication origin
ccccctgggccatcaggaatgccagggcctcctgggccatcagcatcgcccgtcgaaccccctgtgccccggccttcggcctgcatggctccggagcctctgcccggctctcagagagaaggtcagggcccacgaggatgcggaggcagagaggctgcaggaagttccgccccctggcgtgagatgggcagcccgggatcctcagggcgcctgcgcacaggggccctacttccggccctgggagaccccgagtgagccccggagcacgtgaccggttctcaccaaccccgcccctccccaagagagcccgggccggaaggtggccgcaatgccagcttggacccctcacccctgagcagccggctgtccgccggacccctgtcccgggagccctgcagggagtcaggcactgcggggcccagcctgtcccatcccccgggtctccctcacatcgaggagcaagacgggcctgggaacacggggccgggactgtgcggccatcgtcccggaccctgcctgccctgtccgtccttgggggagcgcccaggacagaccccggggggcaggcctctaactgggctcagcagcctccgtccctgtcctggtcgcccagctggtggggtagctggaactgcatgtctggtgggcgtggcctcgcgccagccaaggtctcccaggcgccaggtccagccaaggtggacgggagggcccagcgggacccggggccggatctcactcctgggttcaacgggttctgtccctgtcctagtcgccccgcctggtgggggagctggagctgcgtgtggggtgggttgcgggtggcctcccaccagccaggggctcccgggctctaggcctggcccaggtggacaggcgggacctgctggacctgaggctgggtcgggcctggctcctgggttcggcagtatcagtccctgccctggtcgctcttgcctggtagggagctgggaggtgaccctgtgtctgctcagtggtgatctatttgtgtgtctggaagggggtcaaatccacgggacaggtacctctagaggcatgcaggggtgagggcggcacggccccgggagctgaatgtctgtgccaggcacacctgtagcaacaggaggtgaccagacagggcctagccctgaggaagggggaggtactgaaatccaaaccactctcccccaccttccaaatccaggaatcagcagcctctgcacctgggaaaagcatattggcactcatgtggaaactaaaaacgttgatcttttggaggtagagcagaatgatggttaccagacgctgggaaaggtggggagggtggggaggttaatggggacaaacatatagttgcatagaaggattaagttctagtgtttgatagcaccgtagagggactataggtaattatttattgtatatttcaaaatagctaaaagataggaaatgttccccaaaaaaagaaatgataaatgcttgaggtggtggagatcctaaataccccgacttgatcattacatcgtgtgtgcgtgtgcatgtatcagaatatcacatgtatcccataaatatgcagagttatcatacatcagttaaaaatgtttttacttacagaaaagaaaaattcacccaagctcttgcgtgtacctccagtttattattttcactgctgtatttcattacatatatttcattaaatgatgaattttaaaaaccagagaacacaacttgttaacacctggaatagctgaaaatcagacataacccggttagtgattgccatccttcctgtcgtcctctgctcagtctccccattctcagacagaggcaggctaaagttcttaccttcaacaggtcagggaagggagagtaaagtgcatgtgaccctgtcttaggaagcaggaagacagaggga

SEQ ID NO: 43065 - DNA, 782 bp, Artificial sequence
  DNA replication origin
cacagggggttcgacgggcgatgctgatggcccaggaggccctggcattcctgatggcccagggggcaatgctggcggcccaggagaggcgggtgccacgggcggcagaggtccccggggcgcaggggcagcaagggcctcggggccgggaggaggcgccccgcggggtccgcatggcggcgcggcttcagggctgaatggatgctgcagatgcggggccagggggccggagagccgcctgcttgagttgtattctgttctgttctgttctgttctgttctgacagttctggtggcgaggtgggggccgggagatggggagggcagggccaggtgggggaggaggcgggggagatgcgagtaagtggttgggtgggggtgggggtgggggttgggaggtggggatatgagaggccagctgcgaggaggggaggaggtaagggctgggaggtagagggggtgggggtgggggagaggggctgggtgattgggtgaggggcaccgggtcatgcggggaggggagcaggggccaggagatagggggacccaggtgtaggaggggatcaggaggtggggggaagggggcaagatgggagcgggtggcgggaggtggttgggatggagggtcgagtgatgaggagggggccgggtgatgccacagggggcagggtggggaggggtcttgtaagggcatggaggagtcagcttggggtgcagcaaaggaaagtggggaaccaagacagctgggtggggtgtgctactgggccagtgcctggggagaca

SEQ ID NO: 43066 - DNA, 1446 bp, Artificial sequence
  DNA replication origin
gttgggaggtggggatatgagaggccagctgcgaggaggggaggaggtaagggctgggaggtagagggggtgggggtgggggagaggggctgggtgattgggtgaggggcaccgggtcatgcggggaggggagcaggggccaggagatagggggacccaggtgtaggaggggatcaggaggtggggggaagggggcaagatgggagcgggtggcgggaggtggttgggatggagggtcgagtgatgaggagggggccgggtgatgccacagggggcagggtggggaggggtcttgtaagggcatggaggagtcagcttggggtgcagcaaaggaaagtggggaaccaagacagctgggtggggtgtgctactgggccagtgcctggggagacagcctgggggggatgggctgggcaatccggggtaggggggaggggtgggggagtgggggagggggaagctggcctggggtaagcagcaggccggagccacaggccaagtcctaggagaggatgccttaactgggcccccaccagctacctcgccatgcctttcgcgacacccatggaagcagagctggcccgcaggagcctggcccaggatgccccaccgcttcccgtgccaggggtgcttctgaaggagttcactgtgtccggcaacatactgactatgtcagttcaggaccaggacagggatggggcctgggtgggtggcggtcacagcgtggcagggtgggggctgggatccgcctacaccccacggtcaggctgctagaaacctgggaacaccccagcacagggtctcagaacagagacctggtacaccaggcccgccgccacccgagggagcccagggagatgggtgcagaggtgtcgcctttaacgtgatgttctctgcccctcacatttagccgactgactgctgcagaccaccgccaactgcagctctccatcagctcctgtctccagcagctttccctgttgatgtggatcacgcagtgctttctgcccgtgtttttggctcagcctccctcagggcagaggcgctaagcccagcctggcgccccttcctaggtcatgcctcctcccctagggaatggtcccagcacgagtggccagttcattgtgggggcctgattgtttgtcgctggaggaggacggcttacatgtttgtttctgtagaaaataaaactgagctacgattccgtgtctgagtctcttttcggcgagcgaaggcaccttcggacttgcatgcccttgtcctcgggttgcaggggaggctctgggattcacagattgaagtagcacaaggtaacgggaggcaatttgggaaatgggggaaaatgaaaagccactgggtcccgccattcagcattaactactgtggacattttagaatattttcctcaatatacttgcatttatatgttaaatatatgacagtagc

SEQ ID NO: 43067 - DNA, 1378 bp, Artificial sequence
  DNA replication origin
ctgcgaggaggggaggaggtaagggctgggaggtagagggggtgggggtgggggagaggggctgggtgattgggtgaggggcaccgggtcatgcggggaggggagcaggggccaggagatagggggacccaggtgtaggaggggatcaggaggtggggggaagggggcaagatgggagcgggtggcgggaggtggttgggatggagggtcgagtgatgaggagggggccgggtgatgccacagggggcagggtggggaggggtcttgtaagggcatggaggagtcagcttggggtgcagcaaaggaaagtggggaaccaagacagctgggtggggtgtgctactgggccagtgcctggggagacagcctgggggggatgggctgggcaatccggggtaggggggaggggtgggggagtgggggagggggaagctggcctggggtaagcagcaggccggagccacaggccaagtcctaggagaggatgccttaactgggcccccaccagctacctcgccatgcctttcgcgacacccatggaagcagagctggcccgcaggagcctggcccaggatgccccaccgcttcccgtgccaggggtgcttctgaaggagttcactgtgtccggcaacatactgactatgtcagttcaggaccaggacagggatggggcctgggtgggtggcggtcacagcgtggcagggtgggggctgggatccgcctacaccccacggtcaggctgctagaaacctgggaacaccccagcacagggtctcagaacagagacctggtacaccaggcccgccgccacccgagggagcccagggagatgggtgcagaggtgtcgcctttaacgtgatgttctctgcccctcacatttagccgactgactgctgcagaccaccgccaactgcagctctccatcagctcctgtctccagcagctttccctgttgatgtggatcacgcagtgctttctgcccgtgtttttggctcagcctccctcagggcagaggcgctaagcccagcctggcgccccttcctaggtcatgcctcctcccctagggaatggtcccagcacgagtggccagttcattgtgggggcctgattgtttgtcgctggaggaggacggcttacatgtttgtttctgtagaaaataaaactgagctacgattccgtgtctgagtctcttttcggcgagcgaaggcaccttcggacttgcatgcccttgtcctcgggttgcaggggaggctctgggattcacagattgaagtagcacaaggtaacgggaggcaatttgggaaatgggggaaaatgaaaagccactgggtcccgccattcagcattaactactgtggacattttagaatattttcct

SEQ ID NO: 43068 - DNA, 787 bp, Artificial sequence
  DNA replication origin
cggggcacagggggttcgacgggcgatgctgatggcccaggaggccctggcattcctgatggcccagggggcaatgctggcggcccaggagaggcgggtgccacgggcggcagaggtccccggggcgcaggggcagcaagggcctcggggccgggaggaggcgccccgcggggtccgcatggcggcgcggcttcagggctgaatggatgctgcagatgcggggccagggggccggagagccgcctgcttgagttgtattctgttctgttctgttctgttctgttctgacagttctggtggcgaggtgggggccgggagatggggagggcagggccaggtgggggaggaggcgggggagatgcgagtaagtggttgggtgggggtgggggtgggggttgggaggtggggatatgagaggccagctgcgaggaggggaggaggtaagggctgggaggtagagggggtgggggtgggggagaggggctgggtgattgggtgaggggcaccgggtcatgcggggaggggagcaggggccaggagatagggggacccaggtgtaggaggggatcaggaggtggggggaagggggcaagatgggagcgggtggcgggaggtggttgggatggagggtcgagtgatgaggagggggccgggtgatgccacagggggcagggtggggaggggtcttgtaagggcatggaggagtcagcttggggtgcagcaaaggaaagtggggaaccaagacagctgggtggggtgtgctactgggccagtgcctggggagaca

SEQ ID NO: 43069 - DNA, 1899 bp, Artificial sequence
  DNA replication origin
cagagaggctgcaggaagttccgccccctggcgtgagatgggcagcccgggatcctcagggcgcctgcgcacaggggccctacttccggccctgggagaccccgagtgagccccggagcacgtgaccggttctcaccaaccccgcccctccccaagagagcccgggccggaaggtggccgcaatgccagcttggacccctcacccctgagcagccggctgtccgccggacccctgtcccgggagccctgcagggagtcaggcactgcggggcccagcctgtcccatcccccgggtctccctcacatcgaggagcaagacgggcctgggaacacggggccgggactgtgcggccatcgtcccggaccctgcctgccctgtccgtccttgggggagcgcccaggacagaccccggggggcaggcctctaactgggctcagcagcctccgtccctgtcctggtcgcccagctggtggggtagctggaactgcatgtctggtgggcgtggcctcgcgccagccaaggtctcccaggcgccaggtccagccaaggtggacgggagggcccagcgggacccggggccggatctcactcctgggttcaacgggttctgtccctgtcctagtcgccccgcctggtgggggagctggagctgcgtgtggggtgggttgcgggtggcctcccaccagccaggggctcccgggctctaggcctggcccaggtggacaggcgggacctgctggacctgaggctgggtcgggcctggctcctgggttcggcagtatcagtccctgccctggtcgctcttgcctggtagggagctgggaggtgaccctgtgtctgctcagtggtgatctatttgtgtgtctggaagggggtcaaatccacgggacaggtacctctagaggcatgcaggggtgagggcggcacggccccgggagctgaatgtctgtgccaggcacacctgtagcaacaggaggtgaccagacagggcctagccctgaggaagggggaggtactgaaatccaaaccactctcccccaccttccaaatccaggaatcagcagcctctgcacctgggaaaagcatattggcactcatgtggaaactaaaaacgttgatcttttggaggtagagcagaatgatggttaccagacgctgggaaaggtggggagggtggggaggttaatggggacaaacatatagttgcatagaaggattaagttctagtgtttgatagcaccgtagagggactataggtaattatttattgtatatttcaaaatagctaaaagataggaaatgttccccaaaaaaagaaatgataaatgcttgaggtggtggagatcctaaataccccgacttgatcattacatcgtgtgtgcgtgtgcatgtatcagaatatcacatgtatcccataaatatgcagagttatcatacatcagttaaaaatgtttttacttacagaaaagaaaaattcacccaagctcttgcgtgtacctccagtttattattttcactgctgtatttcattacatatatttcattaaatgatgaattttaaaaaccagagaacacaacttgttaacacctggaatagctgaaaatcagacataacccggttagtgattgccatccttcctgtcgtcctctgctcagtctccccattctcagacagaggcaggctaaagttcttaccttcaacaggtcagggaagggagagtaaagtgcatgtgaccctgtcttaggaagcaggaagacagagggagggtctccgggtccccattattttcccggcctattatcctcagatcaagtcaagaaaggaagtcctaactgattgagagattcctggagatactgccactgtcctggaagtctcagccagccactggaccgga

SEQ ID NO: 43070 - DNA, 976 bp, Artificial sequence
  DNA replication origin
gcaaaagctccctttcctcaggaggaagctggcccagttgcaggtggcctatcaccagctcttccaagaatacgacaaccacatcaagagcagcgtggtgggcagtgagcggaagcgagtgagtgcgaccactggggctctagggctggccttgcctcttcctctccccgtggccctgaaccttgagaatgggtagacctgccttagacttgccttagacctgtgtcaggctgcagctgcgacagctcagggaagctgtggggagatggcaaccccaggatgttgctctcaggagtgtcagcaggccatcttaatggggggctgggccagagccttggggtgctccctctgtggggctggggacgtcttgtctccatggacattccctcttgccagccatcgccatctggcacctggctcagcttcccccaagccaaggtaagcccgacagcatttccaccccagtgttggctgggagccttttcctagtttgtcctcatcagacctaagctggggtgcagtttgctagtgatcacattttagcaggacaccgtcaatcgtaagtgtacccagaggagatttataaggacaaagcctgaagccaggtcacatggggaagagttagctacaaaactggccacttaatctctggaggggggcgttggtggggtgtgtctgtgtgtgtctcagggggctggagatgcctgcgtgggaggagtgcacctctgaccaggtggcagagtggaaggactgagggctctcagctgagctgtgcacatggcgggcacaggaccggctggctgtgagtgggtgtggcctgtggcctgtgaagggtgggaggagggctgtggagctggggattctgggaagggaatgtcggcccagctgggaggttgtaccagatgacctcagcggcctcttcagtcctgaaaaaaacctcagcatctcctctgtcgttttgggccgtgacaggacg

SEQ ID NO: 43071 - DNA, 1357 bp, Artificial sequence
  DNA replication origin
ccagcactgcgggatgcaggcgaccccatccttttctcggaccacccccttcccctggcttccaggtctccttgccatctgtacttggtcacctgctgggcccctgcattgaagcaaacacgtcttaagcaaagctcctcacctgctgctcccacctggccccctgcagttgtcctcgtgtctgttgacggtgcctccaccctgccgcctggcatcagctcgcagtcacagggtgttcagagccgacccccaccccccgcccacgccctgcgcatagcccctcccgtccccccgttcgtcctccctgagtctgctctttccccgtgccagggcccgggcggccagcgagcaggcgcggcagctggagagtgagcgcgaggcgctgcagcagcagcacagcgtgcaggtggaccagctgcgcatgcagggccagagcgtggaggccgcgctccgcatggagcgccaggccgcctcggaggagaagtgagtcagcgggggcggggccgcaccgcagggtctgtggttctacacttgatcttagccgaaaggctgagaagtgtcgggtccatggttctttctgccttctgaggactccttcagattctgcctgtggctgtgggcccattctgtcccttagccttgctaacggtagaggcgaccatgatgacacccggtttgtctttgatacagtcatgccatctgctctccagaccacgtttcactgcgtgtccacacgtggccttttttgtagtttttttttcctagccactaggtcatcaggggacttgtcctttaaaaccccttctaggccaggtgctgtggctcacgcctgtaatcccaacactttgggaggccaaagtgggtagatggcttaagcccgggagttccaagaccagcctgggcaacagaaagacaacaaaaatacccccaaacccccccgtctaccagcatccaatctgggacctcaggttcctgtccttggcgtgccttttcagtctcctttaatctagaacagttcccctgcctttctgagctgtttgtgaagttcacagttttgaacagtgcagggtagttccattgtattattactattattttcaagacagggtcttgctctaccgtccaggctggagtgcagtggcataatctcggcttactgtaccttccgcctcttggtctcaagcgatcctcccaggtagctgggactataggcgcaggccagcacacctggctaatttttgcatttttggtagaggtggcgttttcctatgttgcccgggctggtcttgaactcctgagctcaagcgatcctcctgccttggcttctcaaagtgttgggattatgggcgtgagccac

SEQ ID NO: 43072 - DNA, 2059 bp, Artificial sequence
  DNA replication origin
gtctggagagcagatggcatgactgtatcaaagacaaaccgggtgtcatcatggtcgcctctaccgttagcaaggctaagggacagaatgggcccacagccacaggcagaatctgaaggagtcctcagaaggcagaaagaaccatggacccgacacttctcagcctttcggctaagatcaagtgtagaaccacagaccctgcggtgcggccccgcccccgctgactcacttctcctccgaggcggcctggcgctccatgcggagcgcggcctccacgctctggccctgcatgcgcagctggtccacctgcacgctgtgctgctgctgcagcgcctcgcgctcactctccagctgccgcgcctgctcgctggccgcccgggccctggcacggggaaagagcagactcagggaggacgaacggggggacgggaggggctatgcgcagggcgtgggcggggggtgggggtcggctctgaacaccctgtgactgcgagctgatgccaggcggcagggtggaggcaccgtcaacagacacgaggacaactgcagggggccaggtgggagcagcaggtgaggagctttgcttaagacgtgtttgcttcaatgcaggggcccagcaggtgaccaagtacagatggcaaggagacctggaagccaggggaagggggtggtccgagaaaaggatggggtcgcctgcatcccgcagtgctggggccaggtgagaggagccctcggaactgcccgtggagttccactgggggactgctgggggccccagcaaaagcagtctcagtggagggggtcaggagagactgctgttccaaaaatgagagactgcccacctgggcgtgcaagcactgagctcaatgcagaccgggcctcggccccatccctgctgctgcccagagctctgctggagtcccagacgacctgctcggatgctcagttcccacacctgcccccctacagctcccttaacctccagtttccagggtctggcctcatcccaccacaccaagcccttccacagcctcactgcagggacaatggtgggtgcatctgtccaggtcctgggtggcctctggccacaggcagacacggcccttctccagtcaccccaactctgcctggcaggcctggctgcttggctctcccctccgcgcctgcctgcatactgcccccacaccctgcacgggttccctctgcccatcagagcctgggtcaagctcccctcccctctgccctgctggctgccccaagtgcaccttgaccgcctactgtgctgggatggctggggcccccctggcagctgatccatctgtctggagggcagaagcaggaccgaatgagaaccacagaaacctccctgccctttgacccaatggtcccactcacaagaaccaagacccctttgcaaaagagagtaaccagcaggcctgaggccaccggctggcaaggttggcccttggctggtgaagttcccttgccacagtgacactttctctagtggtcaggtcggtccctgcacctaggccatttgtaggaagaacgtggttgacgtgagcacccgctctgctgctgggagtcggggatttaggtacctgcctggcagagggcgctgacaggacctgcccccagtaaacacccagggcgctgagtctctagcgggcatccctgggcaggaacatggcccgtgtgggaggcgcttctcactgtgccgctcgcagggcagcgggaggctgggacagggcttctccaactccccccacggctcctgccctggcggctcctgccctgtgcctttttccctgtcatcaacctcagccacgagggcgactgtgcgccggtcccagaagtccttccagagaactagacactgtgggtgtgggctcggggcccccagaatgcctcctaaggaaataatccaaactccatcaaagggtcacagagtgcggagagccggctgggacccaggtcccggatgcctggcccagacctctcccgacgtctgccccgacgtgtttacgcagcctgccccggtctatcctcatcaaggagc

SEQ ID NO: 43073 - DNA, 2008 bp, Artificial sequence
  DNA replication origin
gccggctgctcaggggtgaggggtccaagctggcattgcggccaccttccggcccgggctctcttggggaggggcggggttggtgagaaccggtcacgtgctccggggctcactcggggtctcccagggccggaagtagggcccctgtgcgcaggcgccctgaggatcccgggctgcccatctcacgccagggggcggaacttcctgcagcctctctgcctccgcatcctcgtgggccctgaccttctctctgagagccgggcagaggctccggagccatgcaggccgaaggccggggcacagggggttcgacgggcgatgctgatggcccaggaggccctggcattcctgatggcccagggggcaatgctggcggcccaggagaggcgggtgccacgggcggcagaggtccccggggcgcaggggcagcaagggcctcggggccgagaggaggcgccccgcggggtccgcatggcggtgccgcttctgcgcaggatggaaggtgcccctgcggggccaggaggccggacagccgcctgcttgagttgtatcctgttctgttctgttctaggaggttctggtggcgaggtgggggccgtgagacggagacaacagggtcaagaggtggggggcagggccaggaggtgggtgagggcagggccaggtgcggaaggtggggtttgggagatgggggtaaggcgccgggtggggtgggggtgggggctgggagttggaggtcgaggggtggctcagaggaagggagtaggtaggggatgggaggtggagcgtgtgcacagttgggtgctgggcgatggggtgaggggcagggggacaggagacaggggttcttgggtgtgtgaagggatcaggagttggggggaagcgtgcaaggtgggagccggtggctggggtgtgggctggatgggggtggtgtcaagcgatggggagaggtcccggctgatgcggcagggggcatggtggggagggccttggaagggcacgcaggagtcagcttgaggtgcaacagaggaaagtggggaatcaagacagctgggtggggttgctgcaggacctgggccagtgcgtggggagacagcctgaggggatgagatgggcaccggccaaatcctaggagatggcaccttaactgggtccccaccaggcacatcacgatgcctttctcgtcgcccatggaagcggagctggtccgcaggatcctgtcccgggatgccgcaccgctcccccgaccaggggcggttctgaaggacttcaccgtgtccggcaacctactgtttatgtcagttcgggaccaggacagggaaggcgctgggcggatgagggtggtgggttgggggctgggatccgcctccccggaggggcagaaagctagagatctcagaacacccaaacacaaggtctcagaacagagacctggtacaccaggcccgccgccacccgagggagcccagggagatgggtgcagaggtgtcgcctttaatgtgatgttctctgcccctcacatttagccgactgactgctgcagaccaccgccaactgcagctctccatcagctcctgtctccagcagctttccctgttgatgtggatcacgcagtgctttctgcccgtgtttttggctcaggctccctcagggcagaggcgctaagcccagcctggcgccccttcctaggtcatgcctcctcccctagggaatggtcccagcacgagtggccagttcattgtgggggcctgattgtttgtcgctggaggaggacggcttacatgtttgtttctgtagaaaataaagctgagctacgattccgtgtctgagtctcttttcggcgagcgaaggcaccttcggacttgcatgcccttgtcctcgggttgtaggggaggctctgggattcacagattgaagtagcacaaggtaacgggaggcaatttgggaaatgggggaaaatgaaaagccactgggtcccgccattcagcattaactactgtggacattt

SEQ ID NO: 43074 - DNA, 1547 bp, Artificial sequence
  DNA replication origin
aggagctctttccagttttctagacacctgtggaatcccttcacccacccttacccatcggtgtggctgctctccagctcactctcgtcctgctctccccaactgcctcggctccagggggacgaggctttccctgggctgctgccttccctgcccccttcccagtccccagaagggtgccagcctcagaggcctccagagcagagccttgctcaccgcagcagctccagctggaggaggttccccctgcctcctgcaccctgaccccttcttagagcagcagaggcagaagcaggagcctgctttggaaaatgacatgtttttattgctatgtctgcagtggctttttagcacagtagaatgtccccgcaggcccgccaccctcacccagccccagccctgcagcctctgtctgggtgtcggggaagcctttcttggggtcactcagccgtctgaggactggatgtggcacagacatacataggttaaagctgctacacggaagactggagatgcgggaagtgcattcgctttaagcctagaggtggtagccgtgtccggggtcccttcctgggggtgtgcctgttaccgaaataccaagggtttggtctacgtcctgctgctggccgcacagaaagccaatgactgactgagacgaagagcattaccagggaagacggctttaattgggtgctgcagccggggagatgggagttaagtctcaaatccatccccctgactaaaactaggggtttatatagccaggaagaaatgcaccaatgtgtaggaaaacaggaactcgggagggcccagaaagcaatcctgatgaatttggggggtccagcatctcattgtctggatgtggttatctggtgagtttcagttctttgatattttgagaggcccgaaggtcatttcctgaggaaggaattcagataaaacaactgtaaggttcaagcttgaagaccagaagggtcagtttctatgtgtatcaaaaagaacagcctatgggacgattggatcggtttcatgcccaacccagggtacaggatgtgggaagcctgagccggcctggtgagcagcccagacacccgggatggagtattgcagcctctcgccccacagacttgtgaacagggcgtggggacagacacccagctcctagggccatgccacccccacccctgcccgcctctcgcagcacctttcctgtggatctgacccccttccagacacagaagtaagccagcacccagcagacacagggtcacctcccagctccctaccaggcaagagcgaccagggcagggactgatactgccgaacccaggagccaggcccgacccagcctcaggtccagcaggtcccgcctgtccacctgggccaggcctagagcccgggagcccctggctggtgggaggccacccgcaacccaccccacacgcagctccagctcccccaccaggcggggcgactaggacagggacagaacccgttgaacccaggagtgagatccggccccgggtcccgctgggccctcccgtcca

SEQ ID NO: 43075 - DNA, 1406 bp, Artificial sequence
  DNA replication origin
actgggaaataaaatattctataatctttgccctccaggggcatctttctgtatcatctactgaaattgtatagtgaacctttaaaatgtctgtcattccaaaggacaacaaggaaacccatcctgagtcaacactgcaagcactactgtgtgacaaaagcctcacctgctcatgcaggtgatgggagcaggttttcttctcttgcctcctttgagtagcttcacagttaaggaagcagctggataatgcagaggccaagagatattggaccctgtgcttatggactcctggactcaaaagcaaatgatgtagggacacactggcacttagagaaatctcagtatttatgcactcctgatattcacgtgctaaatagaacaaccttcctctaaagttctgttctgcagaacaaacaacaaaaatcttttcaaagacccctaagagagaaacacacactgtctagcccgatgtgaatggggaaagagggcttgagcaactctatgttcaggaaaatctcctgccacacattctggaagtattcatacattattaaagtctttttataatcccacctcttgaacttccacacaatatgtgcctcatctatgtgggaacaaaaacagttgtgaaatttggccagaagaggacagcagtttgagagcactgtatagacaagagcacaaggctgaaccacatttggggtgggctgctttggatgagcgcagacatgcgcgagtttgttcctaccaccgtgcagtgaagttgcagagaaattaggaattaagaacaagatgaatccatccagctactcccagcctaaaaaaagcaagaagtcctaatagctatttatatgcaactccctggggactgaagtggttcttcctaatggctgaaaaacactgagtagcaatcaggtctttaagcagaatgtttttaagaccttatcgtgaggacgctgatggagataatgaacgtttgaggtgtcgatagtacatcttaaaacggtaatggaataggtaggaagattcgctcttccaagtattcctaatttcatattagtaaaagtcagttgtccagctggcactataaaagcgcggtgtcagcattaagaagaagctgaaaggagttacacgatgagaaacgagttacactgtgtagggttccagacagcagtgtccgatgacagctacaagagcagcactccttactccttacggtccagggggaatgcaggcaattcccctctggctgtcagtctccctatcccctgccgcgtctccttcgcggggcgatgggtctcagagccacccccagccaaagaaaggggcacgctttcgagatgtctccctggccgctcctgtacggagagtggcgcctgaggtttcagccccaacccgcctccctc

SEQ ID NO: 43076 - DNA, 1857 bp, Artificial sequence
  DNA replication origin
tgtaggcaacatatgctacatttaattgtgccgcaccaatgcactcagcaagtcatctgtagggttgcatgttttcggggagagatccagggcaagaaaaggctctgtgacaggtccaggccacttgacccttatgaccatgtagattcaacaggtacaggacctttgacacactgggaggctacacggagcctctggcaagtcccagtaggagaaacacacagcaaagccctagagttttgaagtaaaccatgccctctaccacaaaagaagtattttccttttgaccaacagcttccagcttgctcctgggctgtggcaaagtctgaatgcttgaccatggggcaccaaagaaccatggaacttcagctgccactgataaatttggtgctatttcatcctcttttggaagtggaatatttgagaccagactcaagcaggtctggaaggtacaggaaagttgctagagcaggtggctcacatctttgtggcccctgctgctgcatgatcaccattccctggacttacacccagaatgtcgtagggagttcctcatgaccaggtctatcggtcaaggtttcaaaaggaagcaaacagtagactcaaggggttgaaatgaggaaagtataattaagggattttttttttaacagaggtgtaagcaagacttagagaattagcaatgcatagtggggctctcagggactggcaacagttgatatggccacagccactgctaagtgctcaagctgcccacaggcagagacaaacaatgaacccttaataacagcattccctggggggaccagacagccacctggactgccatctggaaggggcagcaattttttctcacttgaacaggtactaattttgtacatggattcgcttttttaaaattcacatttctgctggcactcctgcccattgacttactgaacccattattcacactgacattatctcacacaagaaaatcattataagccagtgtgcgcatgctgatggactccactggtgttaccatgttagctcatcaccctgaagcatctggcctgataggatgggaggttggtcattctgttgaagatgctagcaaacgtcacatagatgatacccacaaaaagcagagggtggtgcttaagtggatgggctcttgacacagctctggctgcctatggatgattttctcgtgtggctctcgacaagtgacactgtcatcctgtttttcattttagtaacctgcaaaattgagataataataagagccctttgacagggtgttgtgtggattcaatgagataacgcctggaaagtgcttagcacaatcgctggcatggtgttagcttggcagtaaggaaggtcacaagtgttaggtgctcatgattgttatttttacttagcgtggtcagcacactagttggcacaatcgactttagatccatcttttaaaaccttcgagtcaaagagattgcaaacagcactaccttttgagtttgggtcatttgggttcattaagacatttagaccgtttagccggcaaagcttatcactgaatacaacgatctttgggggagggacatagaaaacacactactgtgcaagcaatcaagtggaatagggaagtccaagaggagtcttgcttttgtttctccgtgaactatgcacatggcagatgcaggtggtacttgggtttcagctccagggtccctgagacccagggaccagcccgtttggcgtggcggattggggatggggcatgagggcaacaggttccaggctgtgctcccattaggtcgcagggctccttccgagcgctttctcgtgaccctgggtgagagtggcaggcgccctgct

SEQ ID NO: 43077 - DNA, 977 bp, Artificial sequence
  DNA replication origin
ccccgcggcaaggcacgcacagggcagtgcgcgggtgggtgggtcctagcagcgcggcctgacgggaccaaggcggcgggagtctgcggtcgttccctcggctgtggaccgggcggcacgcacgcggtgcagggtaacatggcggatgcggaaggtaagggctgcaggcttccgggccgtgctaactccgggcgactcggggaacgggggtggggggatggtatcggggcccgcgcacgcctccctctggttcccgccggcgtgtcggcctcttcaccgcccggccttaagccggccttgtctctcggccctggctccgtggcaagggcgcgagagtgggagcccctcgcggtgacttggcatgatggggctcggccctctcacctccctggggtccgggtcgccgtcgaaagacatctgccgtgctgcccaccccgcggtggcgtgggacgtggcagtgtctgtgctgctgccagcccggacgccgccgttacagctccatgcgactaggggagcaagggtagtggaaacgggccgagaagaaaaggagcggagggaccccggagcagggatagagctccgagttgcaagaaagttctagaggccacaagcccgcggggacagtcgagtggtcgcttatggaactttccggccccctgcgtgagcgcttctgtgggatgtttaagctctgccatagccacgtggtgaaccggaagggaagccgacacgtgcagtagcctacagtcagttacccagccatgggacccatacatttggccttacacaccttgttttctcgcttacctacggatatacgttctaagaaatgggtcgttaggcgatttcatcattgtgtgaacatcagagggctcttacacaaacctaggtggcataggctactacacacctaggctgtatatggtgtagcgtatggctcctaggcttcaaacctggacagcatggtattgtgcggaatg

SEQ ID NO: 43078 - DNA, 1052 bp, Artificial sequence
  DNA replication origin
aggcgctgagcgtagtggccctcccgtagactgcgctccacctggctcactgaaaacgaaagctccgctcggacggtgcgagagcaggtccgcccccggccgccagcaccggaggaccctcggcgtctcctcctcctcggcatgctgggcgttgagtgtgctatctcggcttggcccagctaggcaagatggctctcaagaggacagttaccgcgtccagtactgtgtatcctagcgaccagggcccagcccctcattggctagggagccgagaccaatgggcacgcacatccggcgacgggcacgcatgtggtgacggcccctcacaagggacacacgtccgtcaggtgacctcatcactttcccattggcctcgagggagcaggcctgggcctagaagtggctggagggccgtgggggtggggtggggcggggcagggggaatcgcgctggtgaccctctctttgccagtgggaactttccctttctactggatgggaacaccgtgggaaagacaaaggggtgggcgaggggaggacgggtaccacgccttcacaatgttgcacatccatcacgaccacctagttccaaaacgttttcaacaccccgaaaagaaaccgaaacccctgtacctataagcagtcacttgccgcacgcctccttccacaccaccactaccagcccccacaccctcccacacacaccccctgcccccgcccatacacacgttcccgatagtccctggcaacccctagtccatctgctttctgtccatagaggttagcctgttctggagatttcctatagatggaattatacgaccaaatgtgaggccgtgtgtgtctggctgctttcacttagcgtaatggtttcatcagggtgcatccatgtagaggcatgaatcactacttccttcctttgaatgactgagtacgattctgttgtatgaataggaggccacattttgtttacccactcgtcagttgatggacaggttatttcccccttctggctattgtgagtggcactgccatgaccatctctctacaggt

SEQ ID NO: 43079 - DNA, 862 bp, Artificial sequence
  DNA replication origin
gcaacattgtgaaggcgtggtacccgtcctcccctcgcccacccctttgtctttcccacggtgttcccatccagtagaaagggaaagttcccactggcaaagagagggtcaccagcgcgattccccctgccccgccccaccccacccccacggccctccagccacttctaggcccaggcctgctccctcgaggccaatgggaaagtgatgaggtcacctgacggacgtgtgtcccttgtgaggggccgtcaccacatgcgtgcccgtcgccggatgtgcgtgcccattggtctcggctccctagccaatgaggggctgggccctggtcgctaggatacacagtactggacgcggtaactgtcctcttgagagccatcttgcctagctgggccaagccgagatagcacactcaacgcccagcatgccgaggaggaggagacgccgagggtcctccggtgctggcggccgggggcggacctgctctcgcaccgtccgagcggagctttcgttttcagtgagccaggtggagcgcagtctacgggagggccactacgctcagcgcctgagtcgcacggcgccggtctacctcgctgcggttattgagtacctgacggccaaggtcccggagctggcgggcaacgaggcccagaacagcggagagcggaacatcactcccctgctgctggacatggtggttcacaacgacaggctactgagcacccttttcaacacgaccaccatctctcaagtggcccctggcgaggactagcttctgacacccggcccctgggacctgacaggtccactcgtccacccacccggccccaaatcccccggcctgaacccccggccttaaacaccc

SEQ ID NO: 43080 - DNA, 1040 bp, Artificial sequence
  DNA replication origin
gagggccactacgctcagcgcctgagtcgcacggcgccggtctacctcgctgcggttattgagtacctgacggccaaggtcccggagctggcgggcaacgaggcccagaacagcggagagcggaacatcactcccctgctgctggacatggtggttcacaacgacaggctactgagcacccttttcaacacgaccaccatctctcaagtggcccctggcgaggactagcttctgacacccggcccctgggacctgacaggtccactcgtccacccacccggccccaaatcccccggcctgaacccccggccttaaacaccctccccccacaacccaggccccaaagtcttgggccttcattaattctgtcaataaaatgtttcaaggaagccatctgcccgcttcagtcactttgccttggggtgggggtgggggggcggtgagatgggttggggggttgtgagacctccacagctggagggatggagaggtggtgggggtctggggttgggtgggagccagggatggcacagaggagcagtctctccgggtgacagtgcaggggagtggccctgggtgggaaggggacacccccgctggttctgagcaagtcagggcctgcccgggaaagtcctcagcatgatggtgttcgttggggcgggtgggcctcaagaccatgactgcagtgttgcgacaggacggacttctaaggcaaccggggtggggacggagaggtggacccggtgcttggcaaggggccctggaccggaagacggaggactgagtagtcggggcggggggggggggggacaacagtctagaaatgcgcagacatggaattagggtcacgagtttcgtttgggtcatgttcagatggagaggctgtgggatgcctttagcaacctagaccacttgcattgcagccgagctagcagcagctggtgccccgccaggccccgcgtaccttcccagggtcttggatccgcatccccgagaccctcgatttgcatacgccgctcacagcccggccaggccccgcc

SEQ ID NO: 43081 - DNA, 1451 bp, Artificial sequence
  DNA replication origin
gtggatcatttgaggtcaggagttggagaccagcttggccaacatggtgagaccccatctctattaaaaatacaaaaattagcccagcgtggtggtgcacgcctgtaatcccaggcaccctggaggttgaggtaggagaatcgcttgaacccaggaggcggaggttgcagtgagccgagatcacgccactgcgctcctgcctgggcgacagagtgagactccatctcggggggaaaaaaaaaaaaaaaaaaaaaaaaaatccctattacaaataaaagctgttgtgatccagactgcatatacctctgcgaatggaaccagaaccgtgaattccaatgcaaatcgatgcatcggcaccagacccgctgcactggatgtatctgcattgcagtcacccgagtacggagcacatcatagatgatctctgcaggttcgttgcccacataggaggcatagcgcaaatttcaaaggaacgaatacatcctggagcccaaacagctatctggttctgctgctggcctcctgacaagtaggtaagagagtcacattttatagacgacggacaccaaaaccacacatgaggagtacaagagtagctttatcatggatttagggctgtggttacaaggaagctgtaaggaataaaatgactcccatgaagacgtaccgtgcggacgagtggaaggagaaatttggccattacaaagacacaggaatatgttaagaagtgaggggcaggatgaaatcatctagggtaggtatttagagggagggcgccgtgcaaaataaaatcctcactatgaaacaaaggcggaggcaggaggctgcgttaggtggaagcagcggaggaaggagacgaaagggattgtcattttcatgtcgtggctttttagaagacagccatgtcctctactctgattctatcaaaatgtgttctcggggtgctggtaacgttcagccaacgaaataattcctatggcggcagtaggaataacaaaacgcagaagcgggaacgatgtctttttattcctccccagacgcaaacgtggatgcatgaggtttggtaacaggcaaagtcatctggttaacgtgactgatgcaaaaagtccaggcctgggcaaaaagaagtcactgggtgaatgggatggatcagactccctgtcctgagggggagatggtttcttgcagaacgaggtgaaggaggtggttctgctcagcagtcaacagtggccacatctccacctgcagcgacttgatggcttccgtgtccttttcgtgggtagccatgaccaaagactggagcagcagaaagagctcctcgggaagctggccgctgctctcctgcccgtggctgtcaaaagcctcccaggagtacttctccagggtctgggcgtgctccggcagcagcttggcgggcggtggttgcaggaggagcagcagcagcacgcggg

SEQ ID NO: 43082 - DNA, 1020 bp, Artificial sequence
  DNA replication origin
acagcatcccaaggcagaagaatttttcctagtacagaacaaaatggagtctcccatgtccacctctttccacacagacacagcaacaatctgatctctccttcctttccccacatttcccccttctctattcgacaaaacctccatcgtcatcatggcccgttctcaacgagctgttgggtacacctcccagacggggtggcggccgggcagaggggctcctcacttcccagacggggcggccgggcagaggcacccccccacctcccggacggggcggctggccgggcgggggctgccccccacctgccggacggggcggctgccaggcggaggggctcctcacttctcagatggggcggctgccgggcggaggggctcctcacctctcagacggggtggctggtcagagacgctcctcacctcccagacggggtggcggcggggcagaggtgctcttcacatctcagacggggtggctgggcagaggcgctccccacatctcagaggatgggcggccgggcagagacgctcctcacttcctagacgggatgacggcctggaagaggcgctcctcacttcccagagtgggcggccgggcagaggggctcctcacatcccagacgatgggcggccaggcagagacgctcctcacttcccagatggggtggcggccgggcagaggctgcaatctcggcactttgggaggccaaggcaggcggctgggaggtggaggttgtagcgagccgagatcacgccactgcactccagcctgggcaccattgagcactgagtgagcgagactccgtctgcaatcccggcacctcgggaggccgaggctggcagatcactcgcggtcaggagctggagaccagcccggccaacacagcgaaaccctgtctccaccaaaaaaatacgaaaaccagtcaggcgtggtggcgcgtgcctgcaatcccaggcactcggcaggctgaggcaggagaatcagtcagggaggttgcagtgagtcgagatggcggc

SEQ ID NO: 43083 - DNA, 1052 bp, Artificial sequence
  DNA replication origin
tatggatcaaggccttctggattggcaacttctggaatttctgttgagtgcagagaggttggtcctgtgagagagggagaataatttggtgggggcgggggggtggggggggaggaaatttctggatgtggatctggttctctttttagtttggaatgatgtatccagtgtggaagggatgttagctttgttgttgtgggattagctaggataacctggtgaggacccgtacacttaggttggagaggggaggaggaagagtctgcgatccagacccagtcccctggttgtagggagagggaggggtatttcgaggatggactttcaggctagggcaagtaaacatttgcatactgtcttattagatgttgagtgaagtgtagtgctggccaagtatctggtacagaaggggaagaagagacagggagattctggaggataaaggagtgtttgtacctgagtttaaatgggcttaggatgaggggcttttggggaatggcttgcaagggcatgagggccaataggagaagtgaagtccagccattttaacctctagagaatctggttagttgttgtttcaaaagggcattggtccatttaacttctcctgaagattgggggcaataaggaatatggaacgctatttaatgtttagagccttcgccagctgttggttaatctgtgaaacaaatgttggcctaatggaagaggggagtttaaactgggagataatatgggtgagaagaatggaagtgacagtgtgtgcctttttggtggtggtaggaaaagtttctatccatccagagaatgtatctattattgtcagaaggtatcagactcgttttataggaggcatgtgtgtgaagttgatttcccagtcctgccctggcaggtgtccttgagcttggtgtgtggggaagggaggtgatttgataccttcttgaggagaagtctgagtgcaaagggaacacgcgttagtaatatttttgtgattggcggccatgatgggagaatatatataagtttttaaaagctggagtaggtggcagtaa

SEQ ID NO: 43084 - DNA, 762 bp, Artificial sequence
  DNA replication origin
ggagcgcctcttcccggccgccatcctgtctaggaagtgaggagcgtctctgcccggccacccatcgtctgagatgtggggagcgcctctgcccggctgcgaccccgtctgggaggtgaggagcgtctctgcccggccgccccatctgagaagtggggagcccccctccgcctggcagccgccccatctgagaagtgaggagcccctccgcccggcagccgcccagtctgggaagtgaggagcgtctccgcccggcagccaccccgtccgggagggaggttgggggtcagcccctgcccggccgccgccccgtccgggaagtggggggcacctctctccagccgccccttctgggaagtgaggagcccctctgccggccgccaccccgtctgggaggtgtgccccgcggctcattgagagcgggccatgatgacgatggcggttttgtggaatagaaaggggggaaaggtggggaaaagatggagaaatcagattgttgctgtgtctgtgtagaaagaagcagacatgggagacttcattttgttctgtactgggaggggttctgctgccttgggatgctgttgatctgtgaccttgcccccagccctgtgctctctggggcatgtgctgtgtccactcagggttaaatggattaagggtggtgcaagatgtgctttgttaaacagatgcttgaaggcagcatgctcgttaagagtcatcaccactccctaatctcaagtacccagggacacaaacactgca

SEQ ID NO: 43085 - DNA, 955 bp, Artificial sequence
  DNA replication origin
ccctttctctacttccccctccacctggcgctctactgtcgggctctctttccctccccctctctctcctccccccttctctgtctctgtatcgctgtctctctcgctctccctctggttctatttctccattcctgtctcccttgctctcctgtagcaggaggagccgcagacaaaacccttcagacaccgagttgtagaaggaagggctttattcagctgggagcatcggcactctcacatctccaaaaaccgagctctctgagtgagcaattcctgtccctcttaagagcttacaactctaagggggtccgcgtgagaaggtcctgatggattgaggaagcagagggtatgtgactggtggctgcatgcaccggtaattatatcagaacaaaacaggacagggattttcacagtgcttttctatacgatgtctgtaatctatagataacataacagagtaggtcaggggtcgatctttaactaccaggcccagggtgtggcgcagggctgtctggctgtggatttcatttctgccttttagattttacttcttctttctttggaggcagaaattgggcataagacaatatgaggggtagtctcctcccttacttcaagctatctgtgtctgtgtctttgtgtgtccgtgtgtgtgtgcccaggtgtggtgtgtgtgtccgtgtgtgtctgtgcacgtgcacctgtgtgtatctctgtgtgtgtgtgttggggtgggtttgctcgtggtggtggtggggtgtgtcttggtgactgtcagctcctctttctagggatcaggctgctggggctctagtgccagcacggggaaaagcagagccttccctccccattggccaaggtcaggtcctcgtcgggacaagcgataatggtgtgggcgttgtgggataaagggcccgtggggctgggccggctgttagcccctgggcagcac

SEQ ID NO: 43086 - DNA, 1670 bp, Artificial sequence
  DNA replication origin
cgggctgtagtgcagtggcgcgatctcggctcactgcagcctctgcctcccaggttcaagtgattctcctgcctcagcctcccgagtagctggcattacaggcgcctgccccaccgcgcccgactcaatttaatatttttagtagagatggggttttgctgtgttggcaaggctggtctcgaactcccaacctcaggtgatccacccgcctcggcctcccaaactgctgtgatgacagacgtgagccactgcgcctggccttaaccatgtatttctaagtcgaggagcttatcagggaaatacaagaagtaggcatgccacacatgacagagagaaaagttggaaaatgccccttccatccaagtgaggatccggcctcgacctcccgaaatcatgcaccgagtggcgaagtctagcaaggcccgtctgtctagattcctctcggcctctctaagcaggtgcttctcactttcttggaagaggcagggccctgcccagcacgggggctctgacagactgacagagaaagagacagacatagaaagacagagatggacagagagagacagagagaaacagacagaaagagagacagacagagacagagagagaaacagacagtcagggagggagagagacagagagagagagacaaacagagagaaataaacagaaacagagagagagacagagaaagagagagaaacagacacacagagacagagacagagagaaacagaaagagagagagacagagagagagaaagggagggagagagagagatagacaaacagaaaggcagagaaagagtaagacagaagacagacacagcgagagagacaggcagagaaagagagagacagagacagagagaaagagagacagagaaagacagagatgggcagaaacagaaagagagagatagagaaagagagaaacagacagacagggagggagagagacagagagagagacagacaggcagagagacagagacagacagagagaaacagacagaaagagagagacggagagagtgagagagagagaaacagaaagagagggggagatagagacagacagagaaggagagtaagacagaagacagacacagtgagagagacaggcagagggagagagagacagagagaaagagagagacagagagagatggagagagagaaacagagagaaacagaaagagtgagagacagagagagagtgagagagagagacagaaagggagggagagggacagacaaagagagagacagaagggtagagaaagagagtaagacagaagataggcacagagagagagagtgatagagacagacagagagactcagaaaaagaaatagagagacaaacagagagacagagaaaaaaagagacagagagagacagagagaaacagagacagacagagagagacagacagagagaaacagtcagaaagagagagacagagagagagagaaacagacagggagggggagagatagagacagacaggcagagaaagagagttagaagacagacaccgtgagacaggcagagagagacagagatagagagaaagaaagagacagacagacagagaaagagacagatagagaaagacagagatggacagagagacagagagaaatacacagaaagagaggtc

SEQ ID NO: 43087 - DNA, 813 bp, Artificial sequence
  DNA replication origin
ggccccctcccttccccaggcgtccctgagcacctctgcgggcctgacgaggggcgactgggggtagggagtgtgacccaccctcagtgagaaagccttctgtagcgatccaagaggtgtgcatttggggtacgggatcccccggcctgccgcctctctctgcgttatggtagcgctgccatagcgactcgcttgcagaggaccctcctccgcttccccctcgacggggtgagggggggagatggagggttccacaggcctccgcggtggggactgggggcggctcatcctttccagatgggggaggatcccagcggtcggtgccggcgtcctagcggttgggaggctatgcaagcggtggctgtgcctggcattccgtccggcgcatgacccgctccactgtgagccggctctccgcccgctcgcctggggagcagcgactggtgccgatgaccgtgtttgcgtggcacggggttgggccacctggccctgggaagcatcccaagtgggggccacgccggtctcccggagcttaaccgggtgggaggatggacgagaaatgagcaacgtggccctggcgttgggtttgtggctgaggtcgctttggggtcccgatggcgggaaccagggctcgtgaggcgggtctcggtgggtgccgagggccatctggcgtcctaggcgggctgccgagggacctccctcgtgtctgtggtggtgggatcccatggtcgcgttttcctggtggcccggccatgcctgaggtttctccccgagccgcccctctgtgggctcccgggtgaccttgccctcgcg

SEQ ID NO: 43088 - DNA, 1545 bp, Artificial sequence
  DNA replication origin
atggtcgcgttttcctggtggcccggccatgcctgaggtttctccccgagccgcccctctgtgggctcccgggtgaccttgccctcgcggtccctggtgtttcctgtctgtgacccccaccccacccgcggatcctctctccctgagcggctcacccgcttaggctgtggtggccccctctgggaccaaacccagctctgccttgtggggcgctgccgggggccactggttggccctttgttcgtgtccccgggtgtgcaccttcgggaccaggtgggcggcgccccgcgtgggcctggtgggcgcccggagggtttggagtcagcctgcggcgcgtgcaggaaagagggttccgggggctggccgtgacggcggcggcgatgggggagccgcaggcccgccgaaggccagtcgaccactcctggtaccgcgcagggtcgccttcgtgctcggaggccgctggtggtgagaccctgggcactgcagtccgcctgtggttcgctgcccaaacgttggggccgccccgtgccggccttgcacgagtggctgctggtcactcacagctgccacgcacgggtcgggtggtctgcctcctcgcacgttggtgcgaagggttcggagtggtgagcaggtcgggggatgttgtgtcatgtgggtgtatgggatgtccggtttgccccaccaccacccccctcccaccgccccacgttgcttccctccctcccacataccccgttgccttccctgccatgcccatcctcacgacttggactcctggctcatcctcgtgaggcccggaggccgctttctacctacatggttgatcctaccagaaccatatgcttgtctcaaagattaagccatacatgtctaagtacgcagggccggtccagtgaaactgcaaatggctcattaaatcagttatggttcttttggtcactcgctcctctcctaattggaaaactgtggtaattctaaatctaatacatgccaaagggcgctgacccccttcgcggggaagatgcgtgcatttatcagatcaaaaccaacccagtcagcccctctccagccccggccggagggtcaggtgccaccagcttttgtgacactagataacctcaggccaatggcatgcccccagtggcagcgacgacccattcaaaaatctgccttatcaactttcgatggtagttgctgtgcctaccacggtgaccatgggtgatggggaatcagggttccactctgaagagggagcctgagaaacagctaccacattcaaggaaggcagcaggtgcaaaaattacccactcccgaccgggggaggtactgatgaaaaataacaatacaggactctttcgaggccctgtaattgaaatgagtctactttaaatcctttaggaggatccattggagggcaagtctggtgccagcagccacagtaattccagctccaatagcatatattaaagttgttaaaaagcccgtagttagatcttgggagtgggcgggcaggctagccatggaccgtccccgccccttgcctct

SEQ ID NO: 43089 - DNA, 1422 bp, Artificial sequence
  DNA replication origin
ctaccacggtgaccatgggtgatggggaatcagggttccactctgaagagggagcctgagaaacagctaccacattcaaggaaggcagcaggtgcaaaaattacccactcccgaccgggggaggtactgatgaaaaataacaatacaggactctttcgaggccctgtaattgaaatgagtctactttaaatcctttaggaggatccattggagggcaagtctggtgccagcagccacagtaattccagctccaatagcatatattaaagttgttaaaaagcccgtagttagatcttgggagtgggcgggcaggctagccatggaccgtccccgccccttgcctctcagcaccccctcgatgttcttagctgagtgtcccgtggcccaaagcgtttactttgaaaaagttagactgttcaaagcaggcctgagccacctagatatctcagctaggaatgatggaatagaaccgccattcttttttgttggttttcaggactgaggccatgattaagagggatggctgggggcattcgtattgtgccactagaggtgaaattcttggactggtgcagttcggaccagagctaaagcatttgccaagaatgttttcattaaccaagaacgaaagtcggagtttcgaagacgatcagataccgtcgttgttccgaccataaacgatgccaactggtgatgcagcggtgttatttccatgacccgctgggcagcttcccagaaaccaaagtctttgggtttttgggttcccaggcgagtatggttgcaaagctgaaacttaaaggaattggtggaagggcaccaccaggagtggagcctgcagcttaatttgactcaatatgggaaacctcacccggcccggacatggacaggattgacagattgataggtctttcttgattccatgggtggtggtgcatggccttagttggtggagtgatttgtctggttaattccgataatgaaggagactctggcatgctaactagttacgcgacccccaagcggtcagcatcccccaacttcttagagggataagtggcatttagccacccgagattgagaaataacacgtctgtgatgcccttagatgtctggggctgcacgcacgctacagtgactggctcagcgtgtgcctaccctacgtggcagacgcgggtaacctgttgaacaccattggtgatggtgatcggggattgcaattattccccatgaatgacgaattcccagtaagtgtgggtcataggcttgcgtgaagtccctaccctttgtacacactgccagtcgctactactgattggatggtttagtgaggcccttggatcggccccgccgggtcagcccactgccctggtggagcactgagaagacagtcgaacttgactatctagaggaagtaaaagtcat

SEQ ID NO: 43090 - DNA, 779 bp, Artificial sequence
  DNA replication origin
cgggctgccaccaggggtgggcagcaaattgcggcaactgggacacgctcccccaccctctccccagtggacccttcctacttgccatcctccccgcccaacaagcccccaccaccgatgatgcgcaacgacaatgatggcacaggaccatccaccccaccagcaccaacaaaccctgcactacgagctgtgtgaggcaggagggagcccccgagggaagaaacaggaccgtggtggtggccacaggaactcgaccccagtgggctctcttccctctctgtttttgcaggtgatggctccactctctctctcttcctcacagccaggagcccctcttccccacaccacccaacccgtgaccacacaggacctgtggtgggggtgggggggaaggggcaggcatggcaggagaggagggcggatgtcgccgggtctgcacttggggggatggaggtccccagtgggccctgccatggaacccccagccgtgcaccccagggagcctgggggcaccctcaggggctaatgattggcaagcaaagctcagacaggcatagccctgggaggaacccgggccgcaagtgcgttcgaagtgtcgatgatcaatgtgtcctgcaattcacattaattctcacagctagctgcattcttcatcaacgcaggagccgagtgatccaccgctaaaagtcatacaaggtcaatttggcaagggcgctcccaacaatgggaggccctcctggcacagcacgtcccccagaggggttacctcaggccggcca

SEQ ID NO: 43091 - DNA, 926 bp, Artificial sequence
  DNA replication origin
cctgtgtgacagagtcagatcctttcaaaataaaggaatagaatagaatggaatggagtggaatggaatggaatggaatggaatggaatggaatggaatggaatggaatggaatggcatggcatggaatggaatggaatggcatggaatggaatggcatggaatggaatggcatggaatggaatggaatggaatggattggaatggaatgcaatgcaatggtgaaatgtaatgtgacttgacattatgcgactgcagtccagcctggttgacagagtgagatactgtcaaaagaaaggaatgggatagagcagagtggaatcaaatgaaatggaacggaatgctgaaatgaaatgtgaaaagagattctgccactatactccaaccttcgtgacagagtgataacctgtcgaaagaaaggaatggaatggaatggactggtatggaatggaatgtagtggagtggagtggagtggggtggagaggaatggattggggtggagtggagtggagtggagtggaatggaatggaatggaatggaatggtgaaacgaaatctgagctgatattgtgccactgcactccagcttgtgtgactgattgagaccatgtcgaaagaaaggaatggaatggattggagtggaatggaatggattggagtggaatggaatggattggagtggaatggaatggaacagaatgcaacggaaaggaatggaatggaatggaatggaatggaatggaatggaatggaatagaatggaatggaatggaatggaacaaaacggaatggaacggaatggaatggaatggaatggagtggaatggaatggaatggaatggaatggaatggaatggaatggaatggaatgggaaggaatggcatggaatagagtggagtggagtgaatgaaatgaatagagtgga

SEQ ID NO: 43092 - DNA, 875 bp, Artificial sequence
  DNA replication origin
atgggatggaatggaattgagtggagtggagtggaatggattgattggaatggaatgggatggaatcaaaagaagtagagtggcgtggattggactggcgtggcatggcatggaataggacacaatggcgtggaaaggaatagaacggtgaaatgaaatgtgagctgaaattatgacactacactaagtcctgtgtgagagagtgagatactgtcgaaagaaaggaatggaatggaatgcatttgaatggaatggaatgaaatggaattgggtggagtgaagtggagtggagtggaatggaatggaaaagtatggaatggaatggaaaggaatggaatggaatgttgaaatgaaatgtgagctgagattgtgccactgcactccaccctgtgtgacagagtgagatcatgtgaaaagaaaggaatggaatggaagttagtgtaatggaattgattgggacagaatggagtacagttgagtggagtggagtggagttgagtggagtggagaggaatggagtggagtggggtggagtggagtggagtggagttgagtggagtggagaggaatggagtggagtggggtggagtggagtggagtggaatggaatggaatggaatagtgaaatgaaatgtgagctgagattcttccactgccctccagcctgtgtgacagagtcagatcctttcaaaataaaggaatagaatagaatggaatggagtggaatggaatggaatggaatggaatggaatggaatggaatggaatggaatggaatggcatggcatggaatggaatggaatggcatggaatggaatggcatggaatggaatggcatggaatggaatggaatggaatggattggaatggaatgca

SEQ ID NO: 43093 - DNA, 1310 bp, Artificial sequence
  DNA replication origin
atggtgaaatgaaaagttagctgagattttgccagtgcactccagcctgtgtgatagagtgagatgttgaaagaaaggaatggaatggaatggaatggaatggaatggaatggaatggaatggaatggaatggaacggaatggaatgcattggaatggaatggaggggagaggagtacagtggagtagattagagtggaggagtggaatggagttgaatggaactggatggactggaatatagcagagtggagtggagtggaatggagtggaatgtactggaatggaatggaatggaatggaatggaatggaatggaatggaatggcatgcagtggagtggagtgtagtagatcggaattaaatggaatggaatggaatgcaacggaatgcaatggaatggtgaaatgaatcttgagctgagattgtgccactgtacttcagcctgagggacagagtgagatcctgtcgaagaaaaggaatggaatgcaatagagtggaatggaatggaatgcaatggagtggagcgtagttgagtggagtggagtggagtggacgggaatggaatggtatggcgtggaatggagtggagtggagtgcagtgaaatatagtggaatggagtggaatgcaatgggatggaattgactggagtggagtggaattgagtagagtagaatgaaatggattggtgtaatgaaatgtgagctgagattctgccactgcactccaaccggtgtgacagagttagatcttgtagacaaaaggaatggaatggaatgaaatggaatggaacgaaatggaatggaatgcaatggaatggaatggagtagagtggagggtggtggaatggtgtggaatgtaattgaaaggaatggaatggaatggaaaagtgaaatgaattgtgagctgaaattgtgacactgcactccagcctaagtgacaaagtgagatcctgttgaagacagaatggaatggaatggagtggaatggaatgaaatggaattgaatggagtggagtggagtggagtggaattcagtggaaaggaatgggatggaatagaatggaatggagtgcagaagagtggattggtgtgaactggagtggaatggagtgggaaagagtggaatggaatggaatggaatggaatggaatggaatggaatggaatggaatggagtggagtagagtgatgtgcagtgcagtggagtggaatggaatggaatggaatggaatggaatggaatggaatggaatggaatggaatagtgaagtgaaatgtgagctgagattgtgccactgcaccccagcctgc

SEQ ID NO: 43094 - DNA, 730 bp, Artificial sequence
  DNA replication origin
ggagtgaaatgggacggcatataatggaatgaagtggagtggagtttagtggaatggagtggaatagagtgaaatggaatggagtggaatggaatggaatggcgtggagtggattgcaattaaatggaaggcaatgaaaggaaatgcaatggaatggtgaaatgaaatgtgagctgaaattgtgtcactgcactccagcctgagggacagagtgagatacttttgaaaaaaaggaatggaatgtaatagagtggaatggattgtagtggagtggagaggagttgactggagtggagtgcattggaggggaatggaatggtagggagtggaatggaatggagtggagtggagtacagtgaagtggagtggaatggagtggaatgcaatgggatggaatggagtggagtggaggtgaaaggagtggaaagaaatgttgaaatgaaatgtgagctgaaagtgcgacactgcactacagccagtatgagagtgagattttctagacagaaagaaatggaatggaattgaatggaatggaatggaatggaatggaatggaatggaatggagtggagtggagtggagtggagtggagtggaatggaatgcaatggaatggaatggaatgcaatggaatggaatggaatggaatggaatggaatggaatggaatggaatggagtggagttgagtggagtggagtggtgtggatttgaatcgaatggcgtagaatggg

SEQ ID NO: 43095 - DNA, 849 bp, Artificial sequence
  DNA replication origin
ggtgtggaattgaatgaaatggaatggaatggaatataattaatggaatgcaacgaaatgtaatggaaaagaactgtgaaatgaaatgtgaggtgagattgtgccgctgcactccagcatgggtgagggagtgagattctgtcgaaagaaaggaatggaatgtaaggaagtggaatggaatggattggagtggagtggagaggtgtgtaatgcagtggagttgaatggaatggaatggaatggaaaggagtggaaaggaatggaaggaaatggaatgcaaagaaatgcaatggaatacaatggaatggtatagaatgtaatggaatgcaacggaatgcaatggaacggaataccatggaatggagtgcaatggaatgcaatggaatagcatggtgaaatgtaatgtgagctcagattgtgccactacactccagcctgggtgagaggaagagatgctttcaaaagaaaggaatcaaatggaaggtgtggaatggaatggaagtgagtggaatggaatggaatggaatggaatggaatggaatgggatggaatggcatgggatgggatggaatggaatgggatggaatggaatggaatggaatggaatggaatgggatggaatggagtggagtgaagtggagttgactggagtggaatggattggaatggaatgggatggagtggaatggagtggagtggaggggagtggaatggagtggagtggcatggaattggatggaatggaatggagtagattggagtggagtggagtggaatggaatggaatggaatggaatggaatggaatggaatggtgaaacgaaatgtgagctgatattggccactgcag

SEQ ID NO: 43096 - DNA, 763 bp, Artificial sequence
  DNA replication origin
tgttatggagtgtaatgtaacggagtggagtggaatagagtggagtggagtggactgaaacggagtagaggggagtggagtgcaggggaatgaattggaatagaatgttatggagtggaatggaatggagcggattgtggtggagtggagtggagtcgagtggagtacataggagtggaatggagtggaatggaatcgaatggaatggaatgcagcagagtggaatggaatggaatgcaatgtataaaatggaatgattaaataaaacgtgagctgagattgtgccactgcactccagctaggtgacagagagacatcctgttgaataatggaatggaatggaaaggagttgcatggaatggaattaagtggagtgcagtggattggcgtgaatggaatgcaatggagtggacaggagtggagtggagtggactggaatggaatcgaatgggttggaatggaaagaagaggagtggaatggagtggaatggagtggaacagaatgagatggaatggagaggagtggactggaatttaatggaattttagggaatggaatggaatggaatggaatggaatggaatggaatggaatggaatggaatggaacggaatggaacggaatggaacggaacagaacggaatggaacggaatggaatggaatggagtggaatggaatggaatggaatggaagggaatggaacggaatgcattggagatgagtgcagtggagtggagtagagtggagaggagtggaatggag

SEQ ID NO: 43097 - DNA, 662 bp, Artificial sequence
  DNA replication origin
aggaatggaattcagtggaatggagtggaatcgatttgaaaggaatttaatgaaatggagtggaatggaatggaatggagtgcaatgaagtggagtgaaatggaaaagaatggaacgaaacggaacggaatacaatggagtggagaggagtggagtggagtggatttgagtggagtggattggagttcagtggtatggaacggaatggaatggaatggaatggagtggagtggactggagtggaatggagtcgagtgcattggaataaaatgaagaggagtgaattggaatggaatggagtggaatggagtggaggggaagggagtggagtggcgtggaatggaatgcaatggagtggagttgaatggagaggaatggcctggaatggaatgaaatggaatggaatggatctgaacagaacaaagtggagtggagtggagtggaatggagttgagtggagatgatcagagtgcagtggaatggaatggaagggaacggaattgatggaagggaatggaatggaatgcattggaatggaatggaatgcaacggaatggaatggaatggaatggaatggaatggaatggaatggactagtgaaatgaaatgtcggctaagaatgtgcctctgcattccagtccaagtgataaagtgagatccag

SEQ ID NO: 43098 - DNA, 778 bp, Artificial sequence
  DNA replication origin
  misc_feature (1)..(130): n is a, c, g, or t
nnnnnnnnnnnnnnnnnnnnnnnnnnnnnnnnnnnnnnnnnnnnnnnnnnnnnnnnnnnnnnnnnnnnnnnnnnnnnnnnnnnnnnnnnnnnnnnnnnnnnnnnnnnnnnnnnnnnnnnnnnnnnnnnnngcagtggaaaggaatggaaatgagtgaagtgaacgtgagtggagtggagtggaataaagtggaaaggaatgtaatggtgaaatgaaatgtaagctgagattgtgcaactgcaatccagcctgtgtgacagagtgagatcctgtccaaggaaagaattgaatggaatggagtggaatggaatggaatggaatggaatggaatggaatggaatggaatggaatggaatggagtagagtggagtggaacagagtgggatggaatgggatcaaatggaaaggaatggaatggagtggattggagtggagtgttgtggaatggattggagtggagtggagtcgtgtggaaaagagttgaatggaatgggatggagtggaatggaatggaatggaatggagtggaatggaatggaatggactggaatgttgtggaatggaatgaatggaatggaatggaatggaatggaagggagtggagtggagtggaattcagtgcagttgagtggaatggaatggaatggaatggaatggaatggaatggaatggaatggaagggagtggagaggagttgactggagtggagtggagtggaggggaatggaatggtagggagtgaaatggaatggagtagagtggagtgcagtgaagtgga

SEQ ID NO: 43099 - DNA, 761 bp, Artificial sequence
  DNA replication origin
ggagtggatcagaatgcagtggaatgaaatggaatggaatggaatggagtggattggactggagtggagtgaaatggagtggaatggaatggaatagaatggaaaggaataatgtgaaacagaaaggatcggagtgaagtggaatgggttggatctgagtgcagtctaatggaatggattgtaaggaaatggaatggaatggaatggaatggaatatagtggagtggagtcgaatggaatggaattgagtggagtgcaatggagtggagtggagtgaaatggcaaagaatggaatggaatggaatggaatgcaatggaattgtatggaatggaattgaattgtgaatgaaatgtgaggtgagatagggccactatacttcattctgagtgacagagtgagatactgtcgcaataaaggaatagaatggaaagcaatagaatggaatgtaatagagtggagtgaaaggaatggaaaggaaataattggagtggcgtggaggggagtggagttgagcggagtggatgggagttcagtggaatggaatggaaaggaatggaatggagtggagtggagtggagtggaatggaatgaaatggaggatagtggagtggagaggagtggagtggaatggagtggagtggaaaagaaaggaatggaatggaatggaatggagcggaatggaatggaatggaatggaatggaatggaatggaatggaatagattagaatggaatggagtggaatggatgggaattaagtg

SEQ ID NO: 43100 - DNA, 713 bp, Artificial sequence
  DNA replication origin
tggaatagagtgaagtggggtggagtgtactggagttgagtggagtggatcagagtccagtggaatggaacacaatggaatggaatggaatgcagtggagtttagctgagtgtattagagtggaatggaatggaatggagttcaatggaattaaatggaatagaatggtgaaatgaaatgtgagctaagattgtgctactgcacttcattaaaagtgacagagtgagatctgttgaaataaaggaatggaatggagtggagtagaatggaatggaatagtgtgcagtggaatggaatggagtgtaatggagtggagtggagaggaatggagtggagtggagatgaatggagtggagtggtatggagtggattggaataaagtggaatgtagtggaatggaatggaatgtagtggaatggaatggaatggagttgatttgagtggagtggactggagtggaggggaatggaggtgaatggcatcagaaatagtggagtggaagggagtggagtggaatggaatggacagtaatggaatggaatggaatggaatggaatggaatggaatggaacggaatgaaacagagatgagtggagtggagtggagttgagtggagtggattggagtgcagtggaatggaatggagtggaatggaatggattggattggagtggagtgcagtgaaatggagtggagtggaatcgagtggagtg

SEQ ID NO: 43101 - DNA, 1341 bp, Artificial sequence
  DNA replication origin
gaatggaatggagtgcaatggaatggaacggaatgaaattcaatggaatagaatggaacgtaattgaatggaatggagtggaatgcaatggaattgttaatgaaaagcgagctaaaattgcgcgacagcactccagtatgcgtgacagagtgagattcattcgaaataaagaaatggaatggaatggagtagaatgaaatggaatggagtggagtgggatggaatgaactgaaatggagtggagcagagtggaatggagtcgagtggaatcgagtgcagaggaatggagtggaatggggtgcaatggaatatcatggaaaggaatggaagggaaagtaatggcatagattggaatggagtggagtggaatgtagtggagtggaaagtagtggagtggaattgagtggaatggaatagaatgtggtggaatcgaattgagtggaatgcaatgtaatggactggagtggagcaaaattgagtggactgtatcagagtgcagtggaatggaatagaatgtagtggaatctaatggaatggaagggtgaaatgaaatgtgagctaagattgtgccactgcacttcagtttggcgacaaagtgagatccagtcaaaataaaggaatggaatggaatgtagtggaatggagtggaatggagtggatggaaaggaatagagtggagtggagtggagtggaatggagtggagtggaatggaatggaatggaatggagtagagtggagaggaaaggagtggagtggaatgaaacggaagggaatggagtggaatgcagggcaatggagtggtaaggaggggaatggagtgaaatggagtggagtggaatggaatggaatggagtggaatggaatggaatggagtgaaatggaatggaatggattggaatggagtggagtggagtggaatggaggggagtggaatggagtggaagggagtgtaatggaatagaatggaatgcagtggaatggaatggaatggagtggaatggaaaggaggggagtggaatggagtggagtggaatggaatggggtggaatggaatggaacgggacataatagaacagaatggaatcaaatggactggagtggcatggagttgagtggagtggatcagaatgcagtggaatggaaaggaatggaatggaatgcaattcaatgcagaggagtggaatggagtggagtggagtggagtggattcgagttgaatggaaaggtctccaatggattggaatggaatggaatggaacggaatggaatgtaatggaaaggaatggtgaaatgaaatgtgagctaaggttgtgacgctgcactccagtctgggtgaaaga

SEQ ID NO: 43102 - DNA, 797 bp, Artificial sequence
  DNA replication origin
gtaaaggaatggaatggagtggaatggaatggaatggtgaaaaaaaatgtgaggtaacattgtgctactgctctccagtatgggtgacggagtgagatcctgttgaaataaaggaatggaatggaatggtttagaatggactggcatggagtggagtggattggaagggagtggaatgtagtggagtggggcgaaaaggagtgcagtggagacgaatggagtggagtggtatagagtggagtggaataaagaggaacgaagtggaatggaatggaatggagtggagtataatggaatggagtggagtggagtggattggaatgcaatggagtggagtggaatggggtggaatataatgtaatggaaaggagtggaatggaatggaatgaagttgaatggaatggagtgaatttgagtggagcggagtggagtggcgtggagtcgagtggagttgagttgaatggtgtgaaattgtgtggagtggaatggagtggagtggaaagcaatggagtttaggaaaaggaatggaacagaacggaatggaacagaacgaaatggagtggagtggtgtggagttgagtggagtggatcagagtgcagtggaatggaatggaatggaaaggaaaggaatggagtgtattggagtggagtggagtggagtggagtggagtggagtgaggtggactggagttgagtgcagtggagtagattggaatggaatggaatggaatggaatggaatggaatggaatggaatggaagggtgaaatgaaatgtgagctaagaatgtaccactgc

SEQ ID NO: 43103 - DNA, 828 bp, Artificial sequence
  DNA replication origin
ggagtggaatggagtggagttgaatgtaatggagtggaatggaacagaatagaatggagtggagtggagaggaatggagtggagtggaatggaatggagtgaaatggaatggaatagaacggaatggaatttaatggtacagaacggaaaggaatggaatagaaaggagtggagtggaatggagtgaagtggagtggaattgagtggagtggatggagtgcagtggaatgcaagggaatggaatggcatgaaatggaatggagtggagttaaacggactagagtggagaggagtggagaggcgttgagtggagtggagtggatcagatcgaattgcagtgtaaaggatactatggaatatagtgaaatggagtgaagtaaatgaaattgagtgatgtgagggggagtgtagcgcattcatgtggagttgaatgcagtggagtggaatgaaatgcagtgaatcgaatagaatggaatggaacacaatggaacggagtggagaggagaggagtggatttgagtggaatggaatggagtggaatggagtgcattggaatggagtggaatggaaaggaatggaatggaatggaatggaatggaacggaatggaacggaatggaacagaacggaacggtacggaatggaatggaatggaatggaacggaatggaatggaaaggaacggagtgaagtggattggagtggtgtggaatggaatggagtggagtggagtggtgtggaatggaatggattggattggagtggaatggaatggaatggaatggaatggaatggaatggaatggaatggaatggaataaaaagcaatgg

SEQ ID NO: 43104 - DNA, 1362 bp, Artificial sequence
  DNA replication origin
gtggagtggaatggaatagagtggaatggaatgggatggaatggaatgcaatgaaatggaatagagtggagtggaggggtgtgcaaagctgttgagtggaatggaatggaatggaatggaatagaatggaatggtgaaatgaaatgtgaggtgagatttggtcactgcactctagcctgtgaaaaagagtgagatgatgtcgaaataaaggaatgcaatggaatggagtagagtggaatagaatgtcatggaatggagagtaagtgataagaatggattaaagtggtgtggagtggagtggagtggaatggagtggagtggaatggaatggagtgaaatggagttgaatggaatgagtggaacgaaatggagtggagcacagtggagtggagtggaatgaagtgcaatggagaggagcggaatggagtggagtggaatagaatggaatggaatggaacgcaacagaatgtaaccgtatggtaggcggtggagcagagtaaagtggagtggagttgagtggagtggatgggagtgcagtggaatggaatggaatggtatggaatggaatggaatggaatggaatggaatggaatggaatggaatggaatggaatggaatggaaaagaatggaatggaatggaacggaacgggatagaatggagtgcaatggagtggagtgtagcatcgtggattgtagtggagtagaggggaatggaatggaatggaatggaatggaatggaatggaatggaatggaaatgattggtgaaaggaaatgggagctaagattgtgccactgcactccagtcgggatcacagagtaagatccggacgaattaaaggaatggaaaagcatagagaagaaggtaatggaatggagtggagtggaattgagtggagtggaatggagtggagtggagtggagtagaatgcagtggagtggagtggagtgcaatggagtggagtggaattgagtggagcggaatggaatggaatgaaatggagtggaatggagtggagtggagtggagtggaattgagtggagcggaatggaatggaatggaatggaatggaatggaatggaatgcaatggaatggaatggaatgcaatggaatggaatgcaatggaatggaatggaatggaatggcaccgaacagagtggagtggagtggagttgagtggagcagatcggagtgcagtagaatggaaaggaattgaatggaatggaatggaatggaatggaatccaatggaatccaatggaatgaaatggtgaaatgaaatgtgagctaagattgtgcaactgcactccagtctttgtgacagagtgagattgagtagaaataaaggattggaatgtaat

SEQ ID NO: 43105 - DNA, 777 bp, Artificial sequence
  DNA replication origin
atcctgtcgaaagaaaggaaaggaagggaatggagtggaatggattggaatggaaatgaatggagtggagtgaagtggagtggaattgaccggagtggagtgtaatggaatggaatggaatggaatggaatggaatggaatggaatggaatggaataaaatggaaaggtgaaatgaaacgtgagttgagattgttccactgcactgcaaactgggtgaaggagtgagatcctgttgaaataaaggaatggaattgaatggagtggaatggaatgcagtggagtgcactggacatgagaggagtagagtggagtgcaggggaatgaagtggaatagaattggatggagtagattggaatggagtggagagtagtggagtggagtggagtcgagtggagtgcagtggagtggactggagtggaaaggaatagaatagaaagtaatgaaatggagtggagtggaatgtattgtagatgaatggagtgcagtggaatagaattgaatgaaatggaatagaattgaatgaaatggaatggaatggaatggaatgcaatggaatggaatggaatagaatggtgaaatgaaatatgagctgagattgtgccactgcactctagcctgagtgagagagtgagatcctgttgaaataaaataatggaatgtaagggagtggaatggaatggagtggagtggagtggagtgtggtggagtggagtggagtggagtggaatgggatgcagtggaatggagtggattggagtggagcggagtggagatc

SEQ ID NO: 43106 - DNA, 644 bp, Artificial sequence
  DNA replication origin
atggaatggaatagagtggaatggaatggaatggaatggagtggagagatgttgactggagtggagtggaatggaggggaatggaatggtagggagtggaatggaatggagtaaagtggagtacagagatgtggagtaaattggtgtggaatgcaatgggatggaatgcagtggattggagtggaattcagtggagtgcaatggagaggactggaatggagaggaatagaatggaatgcaatgaaatggagtggatatgggctgaaattgcttcactgcactccagccagtgtgacagagtcacattttctcgacagaaagtaatggagtggtatggaatggaatggaatggaatggaatggaatggaatggaatggaatggaatggaatggaattcattagagtgcagtggagtggtgcagactggggtggaagagtgtggaatgggatggcagggaatgctatagagtggagtggagtggaataaaatggtatggaatgggatggagtggagaggagaggagtagaatggaatggaacggaatgtaatggaatgcaatggaatggaatgcaaaggaatggtgaaaagaaatgtgagctgagacagtgtcactgctctccagactgggtgacagagtgagatc

SEQ ID NO: 43107 - DNA, 1010 bp, Artificial sequence
  DNA replication origin
gccatggaaaggagaggaatggaaaggaatagcgtggagtttagtggagagaagtggaatggtgtggagttaaattcagtggagtggaattgataggaatggaatggaatggaatggaatggaatggaatggaatggaatggaatggaatggaatggaatggaattgagcgaagttgagtggagtggatcagagtgcggtgaaatggaatggattgtagtggaatggaatggaatggaatgcaatggaatgcaatggaatggaatgaaaaggtgaaatgaaatgtgagctaagattgtgccactgcacttcactctgctgaccaagagagatccagtcgaaataaaggaatggaaaggaatggaatttcatggaatacaatgcagtggagaggaatggaatgtagtagaatagatgggagtgtagtggaatggagtgaaatggaatggaaaggagtggaatggaatggattggattggtatggagtggagtggagtggagtggaacggagtggagtggaatggaatggaaaagagtggaatgcaatggaatggaatggagtggaatgaaatggaatggagtggaatggaatggaaaggaaaagaacaaaaagaacggagagaagtgttgaggagtgaagttgagtggagttgatgggggacagtggtatgaaatggaatggaatagagaggagtggagtggagaagagtggagtggagtggtatggaatggaatggagtggaatggaaaggaatggattggaatggagtggagtggagaggaatggaaaggagtggagtggaatggagagcaatggagtggaatggaatggaattgaattaagtggaatggaatagaatggagtggaatggagtggcacggaatggaacagaacagaatggaatggagtggattggaatggagttgaggggagtggattggagtgcagtggaatggaatgcaatggaatggaatggaatgtattggaaagaaatgataaaggaaatatga

SEQ ID NO: 43108 - DNA, 927 bp, Artificial sequence
  DNA replication origin
aaataaagaaatggaatggaacagagttgcctgttatggaaaggagtggagtgtaattgaatggaatggagtggaatggagtggagtggactggaatggagtggagtggaatggagtttaatggaaaggaatggaatggagagaatttgaatagaatggattagaaaggagtgaagtggaggggaacggaatggagtggagtggagtggtttggagttgaatggaatggagtggaatagaatcaaggggagtggaatggagtggagtggaacaggaagaaaaggagtggaatgcagtggagtcgagtggaaaggagttgaattgaatgaaatggagtggagtggaatggagagaagtggaatagaaaggagtggaatggaatggaatggaatggaacggaatggaatggaattaaacggaatggaaataaatgcacaggagtggcgtggacttgagtggagtgggcaggagggcagtggaatggaatgcaatggaacagaatgcaatggagtggacaggagtggaaaggaatggagtggaaaggaatggaatggaatggtgaaatgaaatgtgagctaagattgtgccactgcactccattctggttgaaagagtgagatccagttgaaataaaggaatggaaagaaatggagtagaatggaatggaatggagtggagtggaatggaatggagaggaatggaatggaaaggaagggaacaaaatggaacggagttgagtggagtggagtgaagttgagtggagtggatgagagtacagtcgaacgaaatggaatggaatggagtggagtggagtgcagtgcagtggagtggagtagaatggagtggaatggaatggaatggagtgcagtgtagtggagtggaatggaacggagtggaatgcaatgggatggaacggattggtgaaat

SEQ ID NO: 43109 - DNA, 867 bp, Artificial sequence
  DNA replication origin
ataaaatggaatccaatggaatggaatggagaggagtggagtggagagtagtggagttgagtggaatggattggagtggggtggagtggagttgaatggaatggagtacagaggaatgaaatggaatggagtggaatggaatgaaatcgagtggagtggaatggaatggaatggaatgaaatggatgggaatggaatagaaaggaatgcaacggaatgcaatggaatgaaatggaatgaaaaggaaaggaatagaatggagtggattggaatggaatagagtggtgtggaatgtaatggagtggagtggaatggagtacaacatagtgaaatggagtggagtggagtgaaatggaatggagtggattagagtcgtttgaagtgcagtggagtggagtggaatgcagtggacttgtgtgaaatgcagtagattggaagaaagtgaagtgcagtgcaatggagtagaatggaacagaacagaaccaaacggaatgtaccagaatggaagggagtggagaggagtggagtggagtggaatggagtgcagaggaatggaatggaagtgaatggaatggaatggaatggaatggaatggaatggaatggaatggaacggaaagtaacagagtgcagtggagtcgagtggaatggagtggaatggagtgaaatggagtggagtggaaaggcgtggagtggagtgcaatggagtggactgaaatgtaatggagtggaatggaatgtaacaaaatggaacggaatggaatggaacagagtgtagtggagtggataagagttgagaagagtggaacggagtgcagtggagtggagtggaatgcaatggagtggagtggagtggattggagtggagt

SEQ ID NO: 43110 - DNA, 692 bp, Artificial sequence
  DNA replication origin
tactgtgtatttgaagggagtggataaaattggaatgaaatggagttgagtggaatggagaagagaggaatcgaatggagtggaatggagtaaaatggaatagaatgggttgtaatcaaatggaattgagtgaagtgaagtggagtggaaaggagtggaatggagtggaatggaatggaatggactggaatggaacagaatggagtggaacggatctgaacggactgaagtggagtggtgtcgaaaggagtggagtggaatggattgtaatggagtttaaggcagtggagtagaatggaatggagtggaatggaatggcgtgaaatggaacggaacggaacggaaggttatggaacgaaatggcacggaacagaaggaagtggattggcgtggagtggtgtggagtgaagtggattggatcggagtgcagtgcaatggaaagtaaaggaatggaatggaaaggaattgaatggaatggagtggaaaggaatggaatataatggaatggaatggaatggaatggaagggaatggaatggaatggaatggaatggaatggaatggaagggaatggaatggaatggaatggaaaggaatggaatggaatggaaaggtgaaatgaaacgtgagctaagattgtgccactgcactccagtctggatgacagagtaagattcattcgaaataaaggaa

SEQ ID NO: 43111 - DNA, 702 bp, Artificial sequence
  DNA replication origin
ggaatggaatggagtggagtcgagtgtagtggaatggagtggaatggaatggactggagctgggtcaaatggaatggagtggaatggagtggagtggaatggagtggaatggaatggagtggaattgaatggagtggaattttgtagaatggacaggaatgaggtggaatgaagtgcaatggaatggagtggagtagactggcatggtatggaatggagtggaatgaaatggaatggaatggagcagaatggaatgaaatggagtggagtggagagaagcggagtgttgttgattggagtggatcagaatgtagtggaatgcaatggcatagaattgagtggagcgaagtgtagtggaaaggagacgaatgcagtggaatggaatggaatggcttgaaatggaaaggaatggaacagaatggaagggaatagaagggaatggaatagaccagaacagaacagaatggcatggagtggagttgagtggggtggatcagagggcagtggaatggaatggagtgcaatggaatggaatggaatggaatggaatggaatggaatgggatggaatggaatggaatggaatggaatggaaagaaaaggaatgaaaaggtatacaatgcagtggagtgcagtgtagtagagtggagtgtaatggaatggaatggaatggtgaaatgaaatgtgagctaatatcgtgcca

SEQ ID NO: 43112 - DNA, 943 bp, Artificial sequence
  DNA replication origin
aatggaaaggaatgtagtataatggagtgaaatggagtggagttgagtggagtaggtcgcagtgcagtggaatgtaatggaatggaatgaaatggaatggaaaagaatgctgcaaaaaaaggtgagctaagattgtgccactgcactccagtctgtgagacagagtgagacccagtcgaaataaaagaacgtaaaggaatggagtagaatggaatgaattggattggagtggaatgaaatggagtggaatggagtggtgtggagtggaaggcagctgagtggaatttagtggaatggaatgaaatggagcggaatggaaagtaacggaacggaacagaaaggaacgtaatgcaacggaatggagtggagtgaactggagtttattggagtggatcggggtgcagcagaatggaatacaatggaatggattgcagtggagtggagaagagtggagtgttctcgaacggagtgcattggagtggaatggataggaatggaatggaatggagtggagtggagtggaatggaatagaatggaatggaatggtatggaacggaaaggaatggaatggaatagaatggcatggaatggaatggaagggaaaggattcgagttgaatggagttgagtggagttgagtggagtggataagagtacagtggaagggattggaatggaatgtagtggagaggaatggaagggaatggaatggattggagtggattggagtggagcggattgaagaggattagagtggaatggaatggaatggaatggaatggaatggaatggaatggaatttagtggaatggaattgagtggagaggagtggaatggattggtatggagtgtaatggaacggagtcgagtgaagtggagtggagtggagtggagtggaatggaatggagtggtgaaatgaaatatgagctaagattgtggcac

SEQ ID NO: 43113 - DNA, 1172 bp, Artificial sequence
  DNA replication origin
gtgatatcctctcaaaagaaaggaatggaatgcaacggtttgaaatggaatggaatggaatggaatcgcatgaagtggattagaaaagagaggagtggagtggagtggaatggagtcgaatggaatgggatggagtggaatgggaaggagtggagtggagtggagtgaaaacgagttgaatggaatggaatggaatggaatggaatggagtggaatggagaggattggaatggaaaggagaggaggggaggggaatggagtggaatggaatgaaactgagtggagtcgagtgcagtggattgcaatggaatggagttgagtggagtggaatggaaagcagtggaagggagtggagagaaatggaatggaacgcaatggaatggtgaaaagaaatgtgtgctgagattgcatgactatgctacagcatcggtgacagagggatatactttcaaaagaaaggagtggaatgtaagggattggataggaatggaatgtaacggattggagtggagtggaatgcaattaagtgggttggagtggagtgcagtggaatggaatggaacggaaaggagaaatgaaatgtgagctgagattgtgccactgcacagcagcctgggtgacagagtgagatccttccaaaaaaaggaatggaaattaatgcagtggaaaggaacagactgtactggagaggagtggagtggagtgaagtagaggggattggagtggaatgcagtggaatggaatggcatggagtggagtggaatgcagtggggtggagtggaatggggtggagtggaatgggttagagtggatgggacaggagaggaaaggagtggagaggtgtggaatggggaggagaagaatggaatgggatggagagcagtggaatagagtggaatgtaatggaatggaaaggagtggagtggattggagtggagagtaggggagtagagtggaatggagtggaatggaatggaatggagtggaatggagaggagtggagtgcagtggaatggaatggaatggatgcagtggggtggagtggattggaatccagtggagtggagtggaatggagtagagtggaatgaaatggagtggagtggggtggagtggagaggaatggagtggattggacaggaatggaatggagtggagtggagtggaatggag

SEQ ID NO: 43114 - DNA, 949 bp, Artificial sequence
  DNA replication origin
agaatggaatggaaaggaatggagtggagttttgtgtagtggaatggagtggagaagagtggagtggagtggacttgaatggagtgaaatggagtgggatgaaatggaaagttgtggaatggaatggaatggaaaggaaaggagtggagtttagtggagtgtaggtgaggggagtggatcagagttcagtgaaatggaattgaatggaatggaatggagcggaatggaaagaagtggagtggagtgaagtggagtggagtggaatgaaatggaatgtaatggattggaatggaaaggaatgaaatggaatggaatggaatggaatgcaatgggatggaataaaatacaatggaatggaatggtgaaatgaattgtgtgctaagattgtgccacagcatggcagtatgggtgacagagtgagatccagtagaaataaaggaatggaatggaatagaatgaattgaaatggatttcagtgtaatagaatggagtgcaattcagtggagtggaatggaatgtagtggagtggaatggagtggagtggaatggaatgggatggagtgggatggagtggagtggaatggaatggagtgaaatggaatggaatggaagggaacggaacagtatggaacagagtggagtggagtagagtagagttgagtggagtggatcggagtgcattggaatggaatggaatggaatggaatggaatggaatggaatggaatggagtggagtggaatgtagtggagtggaatggaatggaatggaacagaacggagtagactcgattggaatggagtggagttgagtggggtggatcgaagtgcagtggaatggaatggaatggagtggaattgaatgaagtagaatggagtggagtggagtggaatggagtggaatggaatggaatggggtgaaatggaatgaaatggaatggaatcgaatga

SEQ ID NO: 43115 - DNA, 908 bp, Artificial sequence
  DNA replication origin
gcagtggaatggaatggaatggaatggagttgagtggaatggattggagtgcaattgaatggaaaggaatggcatgtagtggaacggagtttagtggaatggagtggagtggcatggagttgaatgaaattgaatggaatttatgggaatggaatggaatgcagtggaatgaaatggagtagggtggaatggagtggactggaattgaggggaatggagtgaaatagagtggagtggaatggagtggaatggaatgcaatggaggggaatgtaatgaaatggaactgaatggagtggattggagtggagttgttttgagtggatgcttgtgcagtggaatggaatagaatggaatggagtggagtggagtagaattgagtggaatggaatggaaagcagttgagtggaatggaatgcagtggagtggagtgtatcagtgtggagtggaatcgaattgaacggagtggaatggaattgaatgaaatggagtggaatggaaatgaacggaatggaatggaatggaatggaatggaatggaatggaatggaatggaatggaatgcaacggaatggaatggaatgcaacggaatggaatggaatggtgaaatgaaatgtgaactaagattgtaccactgcactccagtctgggtgacagagtgagatccagtcgaaatgaaggaatgaaatggaatggagtaaaatggaatggaatggagaggaatagaaaggagtggaatcaaattgaatggaatggaatggaatggagtgtaatggagtggagcagaatggagtggagtttattggagtggaatgttttggaatggaatggaatggagtggaatgcaatggagtagagtggagtggaatggagtgtaatgtaggggaatggagtgaaatggagaggagtg

SEQ ID NO: 43116 - DNA, 728 bp, Artificial sequence
  DNA replication origin
gaatggactgggatggaacggagtgcagtgaagtggagtggattagagttaagtctactggagtagagtggaatggaatgggtggagtggaatgggatggagtgaaatggaatggaatggagtggaatggaatggagtgagtgaagtggagtagattggaattgagtggagtggagtggagggcaatggagtggagtggagtgaaatggagtggagtggaatgtagtggagtgcaaaggaatggagtgaaattgaatggaatgaattggaatggagtagagagtagtggaatgcagttgagtgaaatggagtgaagtgtaatgtagtggaatggagttgaatagaatggagtgaaatggaatagaatggagtggaatgaaatggtgtcgatagaagtggtgtggagtcgagtggaataaaatggaatggaatggaatcaaatgaagtggaatagaatattgaaatgaaatctgagctaagatttggcctctgcactacagtctgtgttacagagtgaggtccagtcgaaataaaggaatggaattgaatggattggaatggaatggaatggaatggaatggaatggaatggaatggaatggagtggagtggaatggaatggactggaatggagtggagtggaatggaatgtagtggaaaggagtggaatggagtggactggaatggagtggagtggattggaagggattggagtggactggaatggag

SEQ ID NO: 43117 - DNA, 1179 bp, Artificial sequence
  DNA replication origin
tacagtggattggagtgaattggagtggaatgaagtggagtggagtggaatgcagtgtagtgcagaggaaaggaaaggaatgtagtggaatgcagtagaatggaaaggattggagtggaatgcaatggaatagagtggagtggagtgaaatgccatggagtggagtggaatggagtggagtggaatggaatggaacttaatggaatggaacggtgtgcagaggaatggagtggagtggagtggaatggagtgaagaggagtggaatagagtggagtggagtggaatggattggagagtagtggtaccgaatggaatggagtggagtggaatgcagtggatttgagtggagtggagttgagtggaattaaatgcaatttaacggaatgaaatggaatggtgaaaagaaatgttagctgagattgtacacagcactccagccagggtgaaatagtgagatcctgttgaaagaaagaaatggaatggaatggaatggcatgcaatggaatggaatagaatggaatggagtggagtggaatgcaatggaatgaagtggagtggagtagagtgcagtggagtcgaatggaatgcaatgtagtggagtggagtggaatggaatggagttgaatggaatggagaggagtggagcagagttgagtagagtggagaggagaggagttgagtagaatgaagtggagtggagaggaatgcattggagtggagtggagtggagtagagtggaatggaatggagtggcatggagtgaaatagaatggaatggaagggagtggagtggagtggattggaatggaggggagtggagtggaatggaatggagtgcagtggattgtaatggagtggagttgagtggaatacaatggagtggtgtggagtggaatagaatggagtgcagtggagtggaatggaattgagtggagtgtaataaaatgaaatggagtggatggagtggagtggagtggagtggaatggaatagaatgaaggaaaatgcaatggaatggaatgaaacggaatggaacgtaatggaatggaaggggaaatgaaatgtgagctgagattgtgccactgctctccaccatgggtgacagagtgagatcctgtcgaaagaaaatattggaatgcaatggaatggaatggaatggaatggaatgtactggagtgg

SEQ ID NO: 43118 - DNA, 2718 bp, Artificial sequence
  DNA replication origin
atggaatggaatggaatagaatggagtggagtttagtggagaggtgtggagtggaatggaatggaatggaatggaaaggaatggaatggtgtggactggaatggaatggaatgaagaagagggatgtggggtggaatggagtgcagtggaatggaacagaaatgaatgcgatagagtggaatggagtggagtggagagtagtagagtggagatgagtttaatggagtggaatgtaatcggatgtaatggaatgcagtggagtggagtggagttaagtggaacagagcagaatggaacagatcagaagaaaacggaacggaatggattggagtagattggagtggaccacagtgcagtgtaatggataggaatggaatggagtggagtggagaggactggaatggagtagagtggactgaagtagattggagtgtactggagtggaaggaagtggagttcagtggaatggagtggagaggaatggagaggagtggaatgcagaggagtggaacggagtggaatggaatggaatggaatggactggagtggagtggaacggagtggaatggagtgaagtggaatggaatgagtgcagtcgaatggaatggagtgaaatggtttacagtggcgtggagtattgtataatggataggaggggagtggagtggagtggaatgaaatggagtggagtggaatggaatggagtggaatggaatggagaagaatggaatggaatggaatggaatagaatggaatggaatgaaatggaatagagcagagtgaaacggaatagcattgagtggaatgaaatggagtggagttgaaaataatggagaggagtggaggggagtggagtggattggagtggaatgaaatggaatgcaatggagtgtagtggagtagaggggaatggagtggaatggaatgtagtggaggggagtgtagtggaatggaaggaatggaatggagtggtgtggagtggactggaaaggaatagaatggagtggagttgagtggagtggagtggagtggaatggaatggaattgggtggagtggaatagaatggagtggaatggaatggaacggaatggactgcattggagtgaagcggagtcgaatggcatgctgtgcatcggagtgcagtggagtggaatgcaatggaaaggaatggaatggattggaggagtgcagtggagaggaattgagtagactgcagtggaatgcaatggaatggaattgagtggagtggagttgactagtgtggagtgcagtggagtggaaaagaatggagtggaatggattggaggggagtggagtggaatggagtggaatggaatggaaagcaatggactggagagtagtggagggaaatggaattaatggaatggagtggaggggtgtgtagtggaatggaatggaatggagtgtagttgagggggtggagtggactggaatggaattgggtggagtggaatggaatggagtggaatagaatggaatggactggattggaatggagtggagtcgtatggagtggtgtgcattggagtggagtggaggggaattgaatggaagggaatggaatggaatggaggagtggaatgtagaggaattgagtggtgttgagtggagtgcagtggaatggaatggaatggaattgaatggagtagagtggactaggatggagtgcagtggagtggagtggaaaggaatgtaatcgaatggaatggagtggtgtggagtggagtggaatggaatggaatggagtggagtggagtggagtgcacaggaatggaatggagaggagtggaatggaatggagtggagtggaatgaaatggagtggagggaaaaggattggaatggaatgaagtagaatggagtggagtggaatggaattgagtggaattgactggactggagtgggttggagtggaaaggagtggagtggagtggagttcagtggagagcaatggcatggaatggaggggaacggaatggagtggagtggattgaagtgaaatgaagtggaatggagtgtaatttggtggaatgaactggaatggagtggaattgaatggaatggagtgtagtggattggagtggaagggaattgaatggaatgatctggagtggagtaagttggagtgggaaggagtggagtggagtggagatcaatggcatggaatggagtgtaatggagtggaactgagtggagtgcagtggattgaaaagggatggaatggaatggagtggaactcagtggaatggaaagaaatggaaaggaattgaacagaatggaggggagtgcagtggagtgcattggagtggaatggagtggagtggagtggattgtaattaaagggaatggaatgtagtggagtggagtggagtggaatggaatgaaatggagtgcagtggaatgaaatggtatgcaatgcaaggcaattccgttcaatggaatgtaatgacttgcaatgcaattcaatgaaatggaatagaatgcaatgcaatgaaagttggcaggtaatgtgagctgagattgtgccactgcactccaaacttggtaacacagtgatattctgtcaaaagaaaggattggaatgcaatggtatgaaatgaaatggagtggcgtgaggtgcagtggaaaagagtggagtggagtgcaatggagtcgaatggaatggaatggagtggaatggaatggagtggagtgga

SEQ ID NO: 43119 - DNA, 904 bp, Artificial sequence
  DNA replication origin
atcctgtcaaaagaaaatattggaatggattgcagtgccatggaaaggactggtgtgcagtggagtagaaaggagtggaatgcaatgtgatggaatgaaattgagtggagtggagtggagtagattggaatggaaaggagtggagtctagtggagtgtagtggaaaggagtggagtggaatggaatggaatggaatggaatggaatggaatggaatggtgaaaagaaatgtgtgctgagattgtgctattgtgctacagcctgtgtgacagaaggagatccttttgaaagcatggagtggaatgtaagggattgcaatggaatggaatgaaatgaaatggaaaggagtggagtggaatggaatggagtggaatagattggaatggactggaatagaacggaaagcaatggaatggagtttagtggagtggagtgcagtggaaaggaatggaattgaaaggaatgggatggaggggaatggagtggaatggaatggaatggattgcagtggaatgaaatggagtgtagtggaacggaatggagtggagtggaatggagttgagtggaatggaatggagttgagtggagtggagaggagtggaatggagtggagtgcaatggaatagattggattggaatggaatggaatggattgcagtagagtggaatggagtggagtgaaatggagtggaatgcagtggaatggaatggaatggagtaaattggagtgcagtggaatgtactggattggagtggagttgaatggaatggaattgaatagaatgaaatggaaaggagtggaatggagtggattggagtggaatagaatggaaaggaatggagtggagtggagtggaatggattcgagtggagtggagtggagtcgagtggaatagaatgaaagg

SEQ ID NO: 43120 - DNA, 667 bp, Artificial sequence
  DNA replication origin
agtgtagtggaatggaatggagtggattagagtggtgtggagtggaatggagtagagtggagtgaagtggactggactggaatggaatggaatggaatggaatggaacggaatgaaatggaatggaatggaatggtgaaatgaaagttgagttaagattgtgctactgcactccagtctgggtgacagagtatgatacattcgaaataaaagaatggaatggaatggattagaatggaatggagtgaagagtcatggagaggagtggaatggaaaggaatgtagaggaattgaatggaatagaatggtgaaatgaaatgtgacttgagattgtgccactgcactccagcttgggtgatagagtaatcctgtcaaaagaaaatattggaatggattgcagtgccatggaaaggactggtgtgcagtggagtagaaaggagtggaatgcaatgtgatggaatgaaattgagtggagtggagtggagtagattggaatggaaaggagtggagtctagtggagtgtagtggaaaggagtggagtggaatggaatggaatggaatggaatggaatggaatggaatggtgaaaagaaatgtgtgctgagattgtgctattgtgctacagcctgtgtgacagaaggagatccttttgaaagcatggagtggaat

SEQ ID NO: 43121 - DNA, 1079 bp, Artificial sequence
  DNA replication origin
aactaatggactggaattgagtggaatgaaatagaattgaatggagtggaacggaatggaatggagtgaattgcaatggtatggagttgaatggagagaaatagaagggagttgagtggagtggaatggggtggaatatagtggagtggactggagtggagtggagtggaatggaatggaatggagtggaataaaatggaatggaatggaatggtgaaatggaagttgagttaagattgtgctactgaacccctgtctgggtgacaaaatgtgatacattcgaaataaaagaatggaatggaatggagtagaatggagtggagtcaagaatcatggagtggagtggaatggaatggaatgtaggggaattgaatgcaataaaatggtgaaatgaaatgtgacttgagattgtgccactgcactccagcttgggtgacagcgtaatcctgtcgaaagaaaatattgcaatggattgctctggcatggaatggaatggtgtggagtggagttgaaaggagtggaatggaatggggtggattgaaattgagtggagtggagcagattggaatggaatggagtggagtctagtcgagtgtagtggaaaggagtggagaggagtggaatggaatggaatggaatggtgaaaagaaatgtgtgctgagattgtaccactgtgctacagcctgtgtgatagagggagatcctttggaaagaaaggagtggaatgtaagcgattgcaatggaatggaatgaaatggaatgaaggggagtggaatggagtgtagtggagtagagtggaagggagtggaatagaatggaatgaaatggaatggagtggaatggagtgcagttgagtggaatggaatggaatggagtggaatggaatggaatggataggagtggaatgaaatggagtgtactggaatggaattgagtggagtgcaatggaattgaagggaatggaatggagttgagtggagtggagtagagtggaatggagtggagtggaatggagtggagtggaatgcagtggagtggagcggagtggaatacagtggagtggagtcaaatggggtgga

SEQ ID NO: 43122 - DNA, 1242 bp, Artificial sequence
  DNA replication origin
gtggagtggagtggagttgaatttaatggaatggagtggaatggaattgaatagaatagaatggagtggaatggaatggaatgcaatgcaatgcattccaatgcaaaggaatgcaatggtgtgaaaagcaatgcaatgcaatggaaagttggcctgtcatatgagctgagattgtaccactgcactccaccctggctgacactgtgatatgttgtcaaaagaaagaatagaatccattggtgtgaaatggaatggaatgaaatggcgtgaagtggagtagaaatgagtgaagtggggtgcagtggagtgcaaaggagtggagtggaagtggtgtggagtggagtggagtggagtgaaaaagcgtggagtggaattctatggaatggtatgcaaaggaatggtgaaaagaaatgagagctgatactgtgcaactgcactccagcccttttgacagagagagatcctgtggaaagaaagcaatggaatggaatggagtggaatggaatggcctggaagtgaggggagtgcagtggagtggaatggagtggaatggaatagaatggagtggaatggattggagtagaatggaatggaagggtgtggagtggagtggaatggagtggaatgaaatggaatggagtggagtggagtggacagtaatggaatggaatggagtggagtggagtggaatggagttgaatgtaatggaatggaagagtatggaatggagaggagtggaatggcatagggtggagtggaatggaatggaatggagtggaatagaatggagtggagtggagtggagtggaatggagttgaatgtaatggaatggaagagtatggaatggagaggaatggaatggcatagggtggagtggaatggaatggaatggagtggaatagaatggagtggagtggagtggagtcgactgaaatggagtggaatggactataatggagagtagtgtagtgtagcgtagtgtagtgtagtggagtggagtgcaatggaatggaatggaatggaacggagtggactggactgggataaattggagtggaattgagtggagtagattgaattggagtactgaggagtggaatagagtggagtgtagtggactggaatggaatggagtggagtggactggaatggaggggattggaatgaaatggagtgcagtggagtggaatggagtagagtgaagtggaatggagtagattggagtggaatggagtagagtg

SEQ ID NO: 43123 - DNA, 1202 bp, Artificial sequence
  DNA replication origin
tggagtggaatggagggtagtggaaataaaaggaatcaaatggaatggaatgcaattcaatgcaatgcaaagcactgcaaagcaagacaatgtaatgcaatgcaaaggaatagaatgcaatgcaatggaaagttgacatgtaatgtgaagagagattgtggcactgcactccagtctgagtgacccagtgatatcctgtggaaagaaaggaatggaatagaatggagtgaaatggaatggaatggaatggactagaatggagtggactggagtgtagtgcagtggagttgaatggagtcgaatggaatgggaaggaatggaatggagtggagtggagtgcagtggagtggagaggagtggaaaggagtggactggagtggaattgagtgtagtggagtggagtggattggagtgcaatggactggagtagagtggaatggaacggaatggagtggagtagagtggaagggagtggagaggagtagaaggaatgtgtagaggagtggaatggagtgtagaggagtggagtggaatggaatggagaggattgtaatggaatggagtagacttgagtggagtggaatggagtggaatggagtggagtcgagtagactggagtggagtagagtggaatggaatggagtggagtggattggaatggagagcagtggaatggagtggagttgagtggagtgcaatagagtggaatggaatggaggggaatggaatggagtggaatggattgaaatggagtgaaatggagtggagtggtgtggagtgtagtagaatggaatagaatggagtggaatgaagtggagtggaatggaatggaatggaatggaatggaatggaatggaatggaatggaatggagaggaagcagtggaatggaagggaagcagtggaatggagtggaatgcagtggaatggaataaagtggaatgcaatggagaggaaaggaatggaatggagtagaatggagtggaatggattggagtggattggagtggagtggaattgaatgaattacaatggaatggattagagttcagtggagcagaatggaattgaatggaatgtagtcgtgtgcagtggagtggactggaatggaatgcaatggaatggagtggagtggaatggaatggagaggagtggaatgcaatggagtggaatggaatggaatagaatgcagtggagtgaaat

SEQ ID NO: 43124 - DNA, 1078 bp, Artificial sequence
  DNA replication origin
  misc_feature (1)..(480): n is a, c, g, or t
nnnnnnnnnnnnnnnnnnnnnnnnnnnnnnnnnnnnnnnnnnnnnnnnnnnnnnnnnnnnnnnnnnnnnnnnnnnnnnnnnnnnnnnnnnnnnnnnnnnnnnnnnnnnnnnnnnnnnnnnnnnnnnnnnnnnnnnnnnnnnnnnnnnnnnnnnnnnnnnnnnnnnnnnnnnnnnnnnnnnnnnnnnnnnnnnnnnnnnnnnnnnnnnnnnnnnnnnnnnnnnnnnnnnnnnnnnnnnnnnnnnnnnnnnnnnnnnnnnnnnnnnnnnnnnnnnnnnnnnnnnnnnnnnnnnnnnnnnnnnnnnnnnnnnnnnnnnnnnnnnnnnnnnnnnnnnnnnnnnnnnnnnnnnnnnnnnnnnnnnnnnnnnnnnnnnnnnnnnnnnnnnnnnnnnnnnnnnnnnnnnnnnnnnnnnnnnnnnnnnnnnnnnnnnnnnnnnnnnnnnnnnnnnnnnnnnnnnnnnnnnnnnnnnnnnnnnnnnnnnaatgcagtggggaggagtggaatggagtggagtggagtggaatggaatggaatggagtggaatggaatggagtggagaggaagggagtgaaatggagtggaaggtaatggagtggaacggagtggtattgagtggaatggagtagagtggagtggaatggatgaggaatggaatggagtggagtggtgtggagtggagtggagtggaatggaatggagtgtagtggagtggagtggagtggagtggggtggaatggagtggaatggagaggaagggaatgcagaggagtggactggaatggaatagattggaatggggtggtgtggagtggaatggagtggagtggagtggactggtgtggagtagaatggaatggaatgcagtggagaggagtggaatggagtgaaataaaatggaatggagtggagttgaatggagtggagtggagtggaatggaatggagaggagtggactggagtgtcctgcagtggagtggagtggaatgcagtggagtggattggaatggaatggcatggcgtggaatggagtggaatggaatggagtggagtggggtggagttcagtggagtggaaaggaa

SEQ ID NO: 43125 - DNA, 721 bp, Artificial sequence
  DNA replication origin
gaaatgtgtgttgagattgtgccagtacactacagcctgtgtgacagtgatagatcctgtcgaaagaaaggagtggaatggaagggattggaatggaatgggatgaaatggaaagaagtgaagtggagagaggtggagtggattgcagtggaatggagtggaatggaatgggatgtagtggaatggagtgaagtggagtgcgggggagtggaatggagtggaatggaatcgcatgtaatgtaaaggagtggagtggaaaggagtggaaagtaatggaattgaatgaaaaggaaggagatagaatcgaatggattgcactggaatggaatggaatggaatggaatgcaatggaatgcaatggaacagaatgtaatgcaatggaaagttgacatgtaatgcgagctgagattgtgccactgcactccagcctgggggacaccgtgacatcccgttgaaagaaaggattggaaggcaatggtgtgaaataatggaatgtaatggaatggaatgtaatggaatggaatggaatggaatggaatggaatggaatggaatggaatggaaaggaaaggaatggaatggagtgaactggagtgtagtgtactggggtcgaatggaacgggatgcaaaggaatggtacggagtggagtggaggtgagtgaaatatagtggaaagaatgggatggaatggataacaatggaatggtgaaagaaatgtgagc

SEQ ID NO: 43126 - DNA, 1052 bp, Artificial sequence
  DNA replication origin
gagtggagaggtgtggaatggagtggaatggaatcggatgtgatggaaagcagtggagtggagttgagtgcaacggagtggaattgaatggaatggagtgcaatggaatgaaatggaatgggatgcaatggaatgcaattgaacagaatgcaatgcaatggaaagttgagaagtaatgtgagctgagattgtgccactgcactccagcctgggtgacacagtgatatcctgccaaaagaaaggaatggaatgcaatggagtgaaatggaatggaatggttgcaatggaatggaagggaatggagtggagtgcagttcaatggagtggagtggaatggaatcgaatggaatgggatggaatggaatggatttgagtggagtggagtgtagtagagtggagtggagtgcaatagagtgtaatggaatgggacggaatggaaggcaatggaatggtcaaaagaaatgtgagctgagattgtgcaactacactccagactttgtgacagattgggatcctgtggaaagaaagaatggaatggaatggagtggaatggaatggagtggaatggagtgaagtggagtggagtggactggaatggaatggagtgggtggagtggaatggagtggagtggagtggaatggagtggagtggagtggaatggagtggaaaggagtggagtggattagaatggagtggagggaactgagaggagtggagtggagtggagaagagtggagtggaatggaatggaatggaatggaacggaatggaacagaatggaatggaaagaactggaatggaatagtgaaaagaaatatgtgctgagattggtccattacactacagcctgtgtgacagaggaagatcctgttgaaagaaaggaattgaatggaagggattggaatggaatggaatggaatggaacggaacggaacggaacggaacggaacggaacggaatggaacggaatggaatggaatggaatggaatagaatggattggagtggagtcgaatgaaattgagtgtagtggagtgcagtggaatagaatg

SEQ ID NO: 43127 - DNA, 1009 bp, Artificial sequence
  DNA replication origin
atggagaggaatggaatgggttgcagtggaatggaatggaatggagtggagtggaacagaatgcaatggagtaaagtggaatggagtggagtggaaaggagtggaatgcaatggaatggaattgaatggagtggagagaagtggagaggcgtggagtggaatggagtggaatggaatgaaatggaaatgagtgcagtggcggggagtggaatggaatgaaatggaatggaatagagtaggttggagtagaacataatggaatggattggagtgaaatggaagagagtggagtggaatggagttgaggggagtggaatggatttgagtggagtggaatggaatggattgcagtggagtcgaatggagttgagtgtaatggagttgaatgaagtggaatggtatggaatggagtggagtggtatcgagtggattggagtggagtggaatggaaaggaatggaatagaatggagttgaacggagtggaatggaatggaatagagtggagtgtaatggaatggagagtagtggaatggaatggaatggaatggaatggagtggagtggagtagaatggagtgtaatggagtggagtggagaggaatggagcggaatcgagtggaatggagtggagtggagaggaatagtatggagtggagtggagtggagtggaatggagtagaatggagtggagtggagtggaatggagtgaggtggagtggaatggaatggaatgctatgggagggaatagagtggcgtggaatgtagttgaatggaatggaatggagtggaatggagtgcaatgggatggtatggaatggaatggattggaacggaatggaatggaatggaacagagtggaatggaatggaatggaaatgaatggaatggaatggaataaaatggagtcgaaaggaatgtagtggagtgcagtggaatggagtggaatggtatggagtagagtggaatgcaaaggagtggtgtggaatggattggaacggagtggagtgg

SEQ ID NO: 43128 - DNA, 764 bp, Artificial sequence
  DNA replication origin
gtagggaattgaatggaatggagtagaagggaatggagtggagtggagtggaatggagtggaatggaatggagtggagtggtgtggagtgtactggaatgaaattgactagaacggaatggaatggaatggaacggaatagttaaatgaaatatgagctaagatagagctactgcactccagtctgggtgacagagtgagatccagtcgaaaaaaaggagtggaatggaatggagtggaatggaatggaatggaatggaatggaatggaatggaatggaatggaatggagtggagaggagagtagtcgagtggagtggagtggaaaggaatggaatttagggaaatggaatggaatggaatggaatagaatgatgaaatgaaatgtgagctgagattgtgccactgcactccagcctgggtgacagagatatcctgtcaaaagaaaatattagaatggaatgcagtggcatggaatggaatggagaggagtggattggataggagtggaatggaaagggatggaatgaaatagagtgtagtggagtggagtagagtggaatggaatggagtggagtggagtggaaaggagtggagtggagtggaatggaatggaatggagcggaatggaatggaatggaatggaatggtgaaattaatgtgtgctgagattgtgtcactgtgctacagcctgtgtgacagagggagatcctttcgaaagaaaggagtggaatgcaagggattggaatggaattgaatggaaagg

SEQ ID NO: 43129 - DNA, 925 bp, Artificial sequence
  DNA replication origin
atggagtagagtgaagaggaatggagtggactggaatggagtggagtggaatggagtggaatggagtggaatggaattgatttgagtggaatggagtggagtggggtggagcagagtggaatggattggaagagaaaggaatggaatggaatggagtggagtggagtggtgaggagtggagtggaatggaatggaatggagtggagtggaatggaatggaatggaatggaatggaatggaatggaatggaatggaatggaatggagtggaggggaatggaatggaatggaatggaatggagtagagtggaatggaatgtaatggagtgaagtggaatggaatggaatgaaatgaagtagaatggagtgcaatggattggagttgaggggagtggagaggaattgagtacaatggagtggaatgcatttgagtggagtggagtggcgtggcatggagtagagtgtattatagtagagtagaatggaatgcagcagagtggaatttagtggaatggagtggagaggagtggagtggagtggaatggaatggaatggaatagaatggaatgtagtgaagtggagtagactggagtggagtggaatggaatggaatggtagggaattgaatggaatggagtagaagggaatggagtggagtggagtggaatggagtggaatggaatggagtggagtggtgtggagtgtactggaatgaaattgactagaacggaatggaatggaatggaacggaatagttaaatgaaatatgagctaagatagagctactgcactccagtctgggtgacagagtgagatccagtcgaaaaaaaggagtggaatggaatggagtggaatggaatggaatggaatggaatggaatggaatggaatggaatggaatggagtggagaggagagtagtcgagtg

SEQ ID NO: 43130 - DNA, 855 bp, Artificial sequence
  DNA replication origin
taaaatggagtggagtggagtgtaatggagaggagtggagtggagtggaatgaaatggaatggaggagaatggaatggtgaaatgaaatgtgagctgagattgtgccactgcgcttcaacttgggtggcagagtgagattctgtcgaaagaaaatattggaatggaatgcagtggtatggaatggaatggagtggagtggagtggagaggagtggaatggtgtgaaatggaatctgatgtaatggaatgtagttgagggggaaggaatggagtggattgaagttgaaaggaacagaagaaaacaaatggaaccaaacagagcctagaggagtggagtggagtagagttgagtgtagtggattggagtgcagtggaatggaatggagtgcaggggtatgaaattgagaggagtggattggagtggaagggattggactagagtggactggagtggaattaagtggagtggaatggagtagagtgaagaggaatggagtggactggaatggagtggagtggaatggagtggaatggagtggaatggaattgatttgagtggaatggagtggagtggggtggagcagagtggaatggattggaagagaaaggaatggaatggaatggagtggagtggagtggtgaggagtggagtggaatggaatggaatggagtggagtggaatggaatggaatggaatggaatggaatggaatggaatggaatggaatggaatggagtggaggggaatggaatggaatggaatggaatggagtagagtggaatggaatgtaatggagtgaagtggaatggaatggaatgaaatgaagtagaatggagtgcaatggattggagttga

SEQ ID NO: 43131 - DNA, 893 bp, Artificial sequence
  DNA replication origin
tgtccgagtgagatcttgcgaaaataaatgaatggaatggaattaattggaatggaatggaatggagtggagtggagtagaatgaagtggagtggagttgtggaaaatggaggggagtggaatggagaggagtggagtgcagtggaattgagtggagtggagtagagtggaggggagtagaatggagtggtgtggagtggatttgaatggattggaatggaatggagtggagtggagtggagtgcagtggagttgagtggaatggagttgagtggagtggaatggaacggaacggaatggaatggaacagaatggaatggaacagaatggaatagaacagaatggaatggaaaggagtggaatgcaatgttgaaaagaaatatttactgagatttcgccactatgctacagcctgcgtgacagagggagaccctgtcaaaagaggggaatggaatagaagggattagaatgtaatggaatggaatggatgggagtggagtggagtgaaattgagtggagtggagtggagtggagtgcagtggaatggaacgcagtggaatggaatgatgaaatgaaatgtgagctgagattgtgtcactgcacaccagcctgggttacagagtgagatcctgtcaaaagaaaggaatggaatggaatggaatggagtgtaatggaatgcaatggactggagtggagtggagtggaaaggaggggaatggaatgggatggtatagaatgaagtggagtagactggaatggagtggagtggagtggagtggaatggattggaatggagtggagtggagtggagtggaacggaatggaattgaatggaatggaatggtgaaataaaatgtgagctaagtttctgccattgtgctccagactgggtg

SEQ ID NO: 43132 - DNA, 770 bp, Artificial sequence
  DNA replication origin
ggagaggagtgcagtggagtggagaggactggaaaggagtggaagggaggcggatgaaatggaatttagtggattagagtggaggagagtggaatggaagggattggaatggaatggagtggaatggaatggaatggaatggaatggaatggaatggaatggaatggaatggaatgcaatgcaatgcaatggaatagaacgcaatgcaatggaaagttggcatttaatgtgagctcagattgtgccactgcactccagcctgggggacacagtgatatcctgtccaaagaaaggaatggaatgcaatggagtgaaactgaatgggctggagtggagtggagtggagtggaatggagttgagtggagtggagtggaacggaatggaacggaacggaatggaacagaatgaaacgaaattgaatggtgaaaagaaatgtgtgctgagattgtgcctttacacaacagcctgtgtgacagaggaagattctgtcgaaagacaggagtggaatggaagggattcaaatggaatggaatggaatggaatggaatggaatggaatggattgtggtggagtgtagtggaattgagtggagtggattggagtgcagtggaacggaatggaaaggaatggaatggaacggaaaggaatggaatggaatggaatggaatggaatggaatggaatggaatggaatggaatggaatggaatggaatcgaatggaatggaatggaaagaagtaaaatggaatggtaatgaaatgtaaactgag

SEQ ID NO: 43133 - DNA, 973 bp, Artificial sequence
  DNA replication origin
tggagtgaaatggatggagtggagtgcagtgaagtggagtggagtggaatggagtggaatggaatgggatataatggaatggagtggagtggagtgcagtggagtggacaggagtggaatgaagtggaatggaatcggatgtaatcgaatgtagtagagtggagtggagtggaacgaagtggaatggaatggaattgaatggaacagaatggagtggaatggaatggaatggaatagaatggaatgcaatggaacagaacacaacacaatggaaagttgacatgtaatgtgagctgagattgtgacactgcgcagcagcctgggagacacagtgatatcctgtcaaaaggaaggaatggaatgcaatggagtgaaattgaatgggatggaatggaatggaatggaatgaagtggaggggattggggtggacttgagtgcagtgtaatggagccgagtggaatgggatggagtggaatggagaggactggagtgcagtggagtggagaggagtgcaatggagtggaatggaatgtagtggagtggagtggagtggagtggagggaatggagtaaaatggaatggaattgaatggaatagaatggaaaggaatggaatggaatggtgaaatgaaatgtgagctgagattgtgccactgcactctaggctttgtaacagactgaaatactctcgaaagaaaggaatggaatggaatagagtggaatggaatggaatggaatagagtggaatggaatggaatggaatggaatggaatggaatggaatggaatggaatggaatggaatggaattgaatggagtggagtggagtggagtggagtggagtggagtggagtggagtggagtggaatggagtggagtggaatggaatggaatggaatggaatggaatggaatggaatgcaacggaacagaatggaatgcaatagaaagatgacatgtaatgcgagctgagat

SEQ ID NO: 43134 - DNA, 937 bp, Artificial sequence
  DNA replication origin
  misc_feature (1)..(372): n is a, c, g, or t
nnnnnnnnnnnnnnnnnnnnnnnnnnnnnnnnnnnnnnnnnnnnnnnnnnnnnnnnnnnnnnnnnnnnnnnnnnnnnnnnnnnnnnnnnnnnnnnnnnnnnnnnnnnnnnnnnnnnnnnnnnnnnnnnnnnnnnnnnnnnnnnnnnnnnnnnnnnnnnnnnnnnnnnnnnnnnnnnnnnnnnnnnnnnnnnnnnnnnnnnnnnnnnnnnnnnnnnnnnnnnnnnnnnnnnnnnnnnnnnnnnnnnnnnnnnnnnnnnnnnnnnnnnnnnnnnnnnnnnnnnnnnnnnnnnnnnnnnnnnnnnnnnnnnnnnnnnnnnnnnnnnnnnnnnnnnnnnnnnnnnnnnnnnnnnnnnnnnnnnnnnnnnnnnnnnnatggcagagtgagatcctgtggaaagaacataatggaatggaatggagtggaatggaatgaaatggagtggatggggggcgggggggtggggggggaggggatggagtgggctggcgggggatggagtggggtggagaggagtggaatggaatggagtggagtggactggagtggagtggagtgaaatggcatggagtggagtgagaggagtggaatggagtggaatggattggagtggagaggagtagaatggaatggagtggagtggactggagtggagtggagtgaaatggcatggagtggagttgagtggagtggaatggagtggagtagaattgagtggaatggagaggagtgcagtggaatggagtgtagtggattggagtggagtggagtggattggaatggaattgagtggagtggagaggaatggagtggagtggaatggagtggagtggagtggaatggagtggagaggaatggaatggaatggaatggaaaagaatggaatggaatagaatggtgaaaagaaatgtgtgctgaaattgtgccactatgctacag

SEQ ID NO: 43135 - DNA, 607 bp, Artificial sequence
  DNA replication origin
ttggattggaatgagatggaatggaaagaaatggagtggactggaatgcagtggaatggagtggagtggagtggattggagtgtattggagtaaaatggaatggaatggaatgcaatgcaatggaatggaattgtgaaatgaaatgggacgtgagattgtgccactgcactccagtctgggtgacagagtgagataaaatcgaggaaaaggaatagaatggaatgcagtggaatggaatggaatggagtgtacataagtgcagtggaattcatgaagtgaagtggagtgaaatggagaggaatggaatgggttgaaatggattggattgaagtggagtggagtggggtggaagggagtgcagtggaatggagtggaattgaatgggatcgaagggaatggagtggagtggagtgcagtggagtgaaaaggagtggaatggagtggaatggaatcgtgtgtaatggaatgtagtggagtggaggggagtggattggaacagagtggaacggaacggaacggaatggaatggaatggaatggaatggaatggaatggaatggaatggaatggaatggtgaaatgaaatgtgagctgagattgtgcaaca

SEQ ID NO: 43136 - DNA, 615 bp, Artificial sequence
  DNA replication origin
tggagtggattggaatggaatgggatggaatggaaaggagtggagtggactggaatggagtggagtggtatcaattggagaggacaagagtggagtatagtggagtgaaatagaaaggaatggaatggaatggaatggtgaaatgaaatgtgagctgagattatgccactgcgcttcaagctgggtgacagagtgagatactctaaaaaaaggaatggaagggaatgctgtggaatggaagggaatgctgtggaatggaatggaatggcatggactcgagaggagtggagtggagtggagtggattggaatggagaggaatgaaatgggatggaatggaatggaatggaatgaagtggagtggagtggggtagggtggagtgcagtggattggagcgtaatggaatgggatggagtggaatggagtggagtggaatgcggtggagtagacaggagtggaatgcagtggaatggagacagatgtaattaaatctagtggagtggagtgcagtggaacggagtggaatggaatggaatggaatggaatggaatggaatggaatggaaaggaaagcaatcgaatgcaatggaatagaatgcaatgtaatggaaagttg

SEQ ID NO: 43137 - DNA, 1030 bp, Artificial sequence
  DNA replication origin
ggataggagtggagttgagtggagtggaatggagtcgaatggaatgggattgagtgaaatgggattgagtagagtggagtggagtggagtgaaaaagagtggaatggaatgggatggaatggaatgcaatggaatggtgtaaataaatgtgagctgagattgagctactgcactacagacttcgtgacagagagagattcggtggaaagaaagaaatggaatgaaagggattggaatagaatgaaatggagttcagtggagtggagtggaatggagtggaggggaatggagtggagtggagtgaagtggaatgcagtggagtggagtggagtggagtgaactggagtggagtggaatggaaggcagtggaatgtactggagtggggtgaagtggagggcagtggaatggtgtggaatggaatggaatggagtggagaggagtggattggtgtggagtggagtggagtagaatggaatagattggaatgaaatggattggagtggagtggagcggacttgagtggagtgcagtggaatggagtggaatggaatggcgtgtagtgtagtggagtggaatggaatggaatggaatggaaaggaatggaaaggaatgaaatagaatgttgaaaaggaatgtgtgctgagtttgtaccactaagctacagcccgtgtgacagagggagatcctgtcgaaagaaatgagtggaatagaagggattggaatgtaatggaaagaaatggactggagtagagtggagtggaattgagtggtgtggagtggagtgcagtggaatggaatggaatggaatgcaatggagtggaatggaatggtgaaaagaaatgtgagctgagattgagtcactgcacaccattctgggtaaaagagtgagatcctgtcaaaagaaaggaatggaatggaatgaagtggaatggaatggaatggagtggagttgagtggagtggattggaatggaatgggatggaatggaaaggagtggagtggactggaatggagtggagtggtatcaat

SEQ ID NO: 43138 - DNA, 1825 bp, Artificial sequence
  DNA replication origin
ccattttgaaataaaggaatggaatggaatgtagtagaatggaatgactggagtggcgtggagtggagtggagtggcgtggagtggagttgagtggagtggagtggaatggaatttaggggagtggaatggaatggaatggtgacatgaaatgtgagctgggattttgtaattgcactccattttgggtgacagagtgagatcctgttgaaagaaaatattggaatggaatggagtgtagtggaatggaaaagaatggagtggagtggagtggaatggaatggaagggaatggaatggaatggaagggaaaggaagggaatgcaatggaagggaagggaatggggaaatgaaatgtgagctgacattgtggcactgcactccagcctgggtgaccgagtgagatcctgtcgaaagaaaatattggaatggaatggatttcaatgtaacggaatagagtaaagtggagtggaacggaatgtgatggaatgaaatgtagtggagtggagtagagtggaacggaatggagtggagtggagtggaatggagtggagtgcagtggagtgaagtgcagtggaactcattggaatggaatgcagtggaatggaatgaaaaggaatttaacaggtgctgagattgtgctactgcactacagcctgtgtgacagaggtagatcctgtcgaaagatagtcgtgcaatgggttggagcagagtggagtggagtggaatggagtggagtggactggagtggagtggaatggaatgaagtggactggaatggactgtagtggaatggaatggagtggaatggaatggaatgcagtggagtggagtggaacggagtggagtggtgtggagtagagtggaatggggtggagaggagtggagtggagtggagtggaatggagtggaatggaatggagtggagtggagtggagaggaatggaatggaatggaatggaatggaatggaatggaatggaatggaatggaatggaatggaatgcaattaagtggagtggagcaaagtggagaggagtggaaaggaatggaatggaatagagtggagtggatttcagtgaagtggagaaaagtgcaatgtagtggaatggaatcagatgtaatagaatgtagtacactggagtggagtgaagtggaacgaactggaatggaacggaatggaacggaacggaacggaatgggtgctgagattgtgccactgcactacagcctgcgtgacagagagagatactgtagaaagaaaggagtggaatgggataggggggagtggagtttagtggagtggaatggactggaatggagtggagtggagtggaatggaatgcagtggagtggaatggagtggagtggaatggagtagagtggagtggagtggaattcggtggagtggagtggagtagaatggaatgcaatggaatggaatggaatggagtcgactggattggtgtggactggaatgaagtggattgaaatagaaaggagcggaacggaatgggatggaatggaatggaatgaagtggagtggagtggggtggagtggagagcagtggaattgagcggaatggaatgggatggagtggatggagtggaatggagtggagcgcagtagagtgaataggagtggaatggagtggaatggaatcgaatgtagtggaatgcagtggagtggagtagaacggagtgggatggaatggaattgaattaaatggaatggaattgaacggaatgcaatggaatagtatgcaatgcaatggaaagttgacatgtaatgtgagctgagattgtgccactgtactccagcctcggt

SEQ ID NO: 43139 - DNA, 1037 bp, Artificial sequence
  DNA replication origin
gaatggaatggtgaattgaaatgtgagctgagatactgccactgcactccagcctgggtgacagagtgagatcctctcgaaagagaggaatggaatgcaatggagtggaatggaatggaatggaatggaatggaatggaatggaatagaatgggatgggatggggtggagtggagtggagtggagtggagtggagtggaatagaatggaatggaatggaatgggatggagtggaaggaatggagtggaggggagtggagtggacgggagtggagtggagagaaatggagtgaaatggaatgggatggaatggaatggaatgggggaggggaggggagtggagtggaattgagtgtagtgggatggaatggaatggaaaggaaagaaaaaatggaatggtgaaatgaaatgtgagctgagattttgcccctgtattccagccatttttgacacagtgatatcccatcgaaagaagggaatggaatggaatggggtggaatggaatagaatggaatagaatggggttgaatggaatggaatggaatggaatggaatggaatggaatggaatggaatggaatggagaaattaaatgtgagctaagattgtgccactgcactccagtctgggtgacagagagagatccattttgaaataaaggaatggaatggaatgtagtagaatggaatgactggagtggcgtggagtggagtggagtggcgtggagtggagttgagtggagtggagtggaatggaatttaggggagtggaatggaatggaatggtgacatgaaatgtgagctgggattttgtaattgcactccattttgggtgacagagtgagatcctgttgaaagaaaatattggaatggaatggagtgtagtggaatggaaaagaatggagtggagtggagtggaatggaatggaagggaatggaatggaatggaagggaaaggaagggaatgcaatggaagggaagggaatggggaaatgaaatgtgagctgacattgtggcactgcactccagcctgggtgacc

SEQ ID NO: 43140 - DNA, 818 bp, Artificial sequence
  DNA replication origin
tgtaacggaatagaatggaatgatgaaatgaaatatgagttgagattgtaacactacactccagccagtgtgacagagtgaaatattgtcaaaagaaaggaatggaatggacaggtgtggaatggaatggaatggaatggagcggagtggagtgcattatattggaatggagtggaatggaatgggatggaatgggatggagtggagtgaagtggagtggagtggagtgtaatggaacggtatggtatggtaaggaatggaatggaatggaatggaatggaatggaatggaatggaatggaatagaatggaatggaatggagtggagtggagttgagtggagttcgcaggagtggaatgaaatgggatggaatagaattgaatgcattgcaatggaatggaatgcaatggaattaaatgcaatggaatgcaatggaatggaatggaatgcaatggaatggaatggtgaattgaaatgtgagctgagatactgccactgcactccagcctgggtgacagagtgagatcctctcgaaagagaggaatggaatgcaatggagtggaatggaatggaatggaatggaatggaatggaatggaatagaatgggatgggatggggtggagtggagtggagtggagtggagtggagtggaatagaatggaatggaatggaatgggatggagtggaaggaatggagtggaggggagtggagtggacgggagtggagtggagagaaatggagtgaaatggaatgggatggaatggaatggaatgggggaggggaggggagtggagtggaattgagtgtagtgggatg

SEQ ID NO: 43141 - DNA, 836 bp, Artificial sequence
  DNA replication origin
ggagtggcggagagtggaatagagtcgagtggaatagaatggagcagaatagaatggaatggaatgcaatggaatggaatgcaaaggaatggaatgcaatggaatagaatggaatggaatggtgaaatgaaatgtgagctgaatttgtgccactgcacgccagcctgggtgacagagtgagatgctgttgaaagaaagaaatggaatggaatggattggagtggagtggtgtggagtggagtggtgtggagtggaatggaatgggatggactgtaatggaatggagtgctgtggaatggagtggcagagagtggaatggagtcgagtggaatggaatggaatgaaaggagtggagtggagtgcagtggaatagagtggaatggaatggaatggattagcgaaatgaaatgtaagctgagattatgccactgtattccagaatgggtaacagagtgacatagtgtggaatgtaaggaatggaatggattggagtggaatggattggaatgtagtggagtggataggagtgaagtggaatggaatggagtggagaggaatggaatggaagggagtggataggagtggatgggagtggagtagaatggaatggaatgggatggaatcgaatggaatgaaatggaggggagtggagtggtatggaattggatggaattgaatgtagtggagtggagaggagtggagtagagtggagtggaacggaatgaaattgaatgaagtggagccaagtggagtggagtggaatggaatatagtggaatggaaatgaatagaatggaaaggaatgtaacggaatagaatggaatgatgaaatgaaat

SEQ ID NO: 43142 - DNA, 1146 bp, Artificial sequence
  DNA replication origin
tggagtggattgcagtggagtggagtggagtgaaatggagtggaacggattggtgtggaatggaatggagttgagtggagtggactggaatggagtggatgggggtggaatggagtgcagtggaatggaatcaagtggaatggaatggggtggagtgtggtggaatggaatggagtggagtggagcttaatgttatggcgtagagtggaatggattggaatggactggagtggaatggattggagtggattggagagcagtggagtggtgtggagtggaatggaatggaacggagtggcatgcagtggagtggaagggagtggagtggactggagtggatttgaggtgaatgaaatggaatggaatggaatggactggaatgggtgatgagattgtgccactgcataaaaacctgtgggacagagggagatcctgtcaaaagaaagaattgtaatcggaagcagtggagtggattggagttgagtgaaacggagtggaatggagtggagtggagtggaatggactggagtggagtggagttgaatggaatgtggtggagtggaatgaagtagagtggaatggagtggaatggaatgtgatggaatggaatggaatggattatggtgtagtggagttgattggagaggagtagagtggattgtagtggaattaaatgggatggaatggaatgccatcgagtggagtggagtggactggagtggcggagagtggaatagagtcgagtggaatagaatggagcagaatagaatggaatggaatgcaatggaatggaatgcaaaggaatggaatgcaatggaatagaatggaatggaatggtgaaatgaaatgtgagctgaatttgtgccactgcacgccagcctgggtgacagagtgagatgctgttgaaagaaagaaatggaatggaatggattggagtggagtggtgtggagtggagtggtgtggagtggaatggaatgggatggactgtaatggaatggagtgctgtggaatggagtggcagagagtggaatggagtcgagtggaatggaatggaatgaaaggagtggagtggagtgcagtggaatagagtggaatggaatggaatggattagcgaaatgaaatgtaagctgagattatgccactg

SEQ ID NO: 43143 - DNA, 1059 bp, Artificial sequence
  DNA replication origin
aaaatctgcaacctgggctccggaatgccgatggcctgggccagccgttttctggtggcgatgcccgggtatgggttccgctcaaagctggctcgcagggcctcactttggctccgggtccaaacgagtctccttcgccgtccccgtccccgggcttctgcagggagggtgctgtccgaaggtgtcgggtgggacatcgcggggagccccggccgaaatttcgcggacggacatgggcagagaggccagcgggctcccgtgcaccacagccgtcctgtgcactgcggcaggtgcagccaggaggcgtgcccggacagccagccagcgactcttataaaggccctcaggtaggcaggttccagaacttcatgaatggccgtgagccctgggacagcacgccccaccccggaagggtcccagggcgtcgaggcctgaggccgggggatggtggagtgtggggggtgggcgtggtgatggcggtggtggggccagagacacgaagatgaagggggcgagggggtaggggtgaggggggcacgattcgggggctggctctccggaccactccaggaatcccgcgggaactggaagctgctctctgggttcccatgcgtcttcagcagggagaaaccggcttgggagggtggaggggagtgtggaactgaacctccgttggagtctggagtgttccaagccctctctcagtgaaggaggcagtgcctgtgggtgtcgctgttgccaggacagtctcacacacgcaggcgtgtggctctcgttcatttccaagtaggagacaagagcgagaacccagagagaagatgccaccccggcgtgatgaccagacgatggattcccgtgtgccgcaacatggggagtctgcagtgtggccggtttggaaactggcaaggagagcgagggcaccatgccagacttccacccttccctgcatgtttctgggtgcccgcagagctccgggaggaaacagtcagcaggacacatctctgaactgatcaacaaagtgatgtaactcttgtctacgctctgcctacaggggctttg

SEQ ID NO: 43144 - DNA, 830 bp, Artificial sequence
  DNA replication origin
tttcagggacagaaaagggcacagagaggccagcgggctcccttgcacgtcagccggagtgcgcaatgagcgcaggtctagccaggaggccggcaaggagagctagaggtctgtgttccaccgccaagtgctccatggtggcagctgggatgctgcagggtaccggcggctgggcgacggtggcgcagaggcccagaggatgcgagctgccagaggggtgtcaggcctggagctgtgcgggccggtgtttcgtgggatggggatttccacccatcccaggggaggatgcactttccggggctggtgggtgggggtggggaggcgttggtcaggcggggttgtgggggtggaaaggcatgagagctcttcccgggctgctcccacagcccacgtggctgcccgctaaccggcgcgtgcacagtctgtggcccacctgctggtacctgggccggctctgggatccccgggatgcccaggaaagaatggcagatctccgctgtgtggagtctctcaccgggcctatacctagaaggcaggaatcccaggccggtcagcccagtggaggggggggaagacacacccctccatagccagccaggttttccccgcgaaagagaggccaccaccctgccccgacccgaccccgtcccaatcccgcgtgctaaagctcctccagcagaaaacggtatacttcctcgctgaggggtgcttccagtgaggcggcctcttccaaggcctccatctcccccgggcctccgtttctaggaaaggttgcgcctgctgcagaaactccgggctcaccaggagctcatccagcagcaggccggagg

SEQ ID NO: 43145 - DNA, 879 bp, Artificial sequence
  DNA replication origin
gctggctatggaggggtgtgtcttcccccccctccactgggctgaccggcctgggattcctgccttctaggtataggcccggtgagagactccacacagcggagatctgccattctttcctgggcatcccggggatcccagagccggcccaggtaccagcaggtgggccacagactgtgcacgcgccggttagcgggcagccacgtgggctgtgggagcagcccgggaagagctctcatgcctttccacccccacaaccccgcctgaccaacgcctccccacccccacccaccagccccggaaagtgcatcctcccctgggatgggtggaaatccccatcccacgaaacaccggcccgcacagctccaggcctgacacccctctggcagctcgcatcctctgggcctctgcgccaccgtcgcccagccgccggtaccctgcagcatcccagctgccaccatggagcacttggcggtggaacacagacctctagctctccttgccggcctcctggctagacctgcgctcattgcgcactccggctgacgtgcaagggagcccgctggcctctctgtgcccttttctgtccctgaaattcctgttgaggctctcccaacaccttccgacgctcgttagtcaaagcctggagaatagttacatatcctggatgagcagttcagaaatatggcacaatgtcccctccctgtggagcctagagaagatttgcatcatttgcgtgatcagtgcagagatatatcacaatgtcccctgtacaagaagcctggaaatgatttacatcacctcggtgatcagtgcataggtatgtcagaaatccccagtaggctgaacttagacaagggttacatcacttaggtgatc

SEQ ID NO: 43146 - DNA, 1421 bp, Artificial sequence
  DNA replication origin
cagcggtactctggtggcgatgtccgggtatgggttccgctcaaagcaggcttgcagggcctcactttggctcggggtccaaacgagtctcctagaccgtcccagtccccgggcttccgcggggagtgtgccgtccgaaggtgtcgggagggccatcgcggggagccccggccggaatttcacggatggacactggcagagagaggctggcgggctcccgtgcacctcagccagcctgtgcactgcggcaggtgcagccaggaggcctgcccggacagccagccagcggctcttataaaggcacgcagacaggcaggctgcaccccttcatgaatggcggtgagccctgggacagcccaccccaccacggaacgttcccagggagtcgaggcctgcggccgtgtggtggtggggtggtggggagggcgtgctgatggctgtggtgaggctggagaaatgaagaggaagggggtgagggggaaggggtgaagggggcgcgtttcagggactggctctccggaccactccaggaatcccgcgggaactggaagccactctctgggctcccacgcgtcttcagcagctagaaacccctctgggagggtggaggggagtttggaactgaacctctgtgggagtctttggtgttccaggccctctctccgagaaggaggcagtgcctgtgggtgtcgccgttgccgggacagtctcacacaggcaggcttgtggctctcgttcatttccacgtaggagaccagagcgagacaccagagagaagatgcctccctggcgtgatggcctgaagatggattcccgtggtcagcaacatggggagtctgcagtgtggccggttttcaaactggcaaggagagcgaaggcaccatgccagtctcccacccttccctgcatgtttctgggtgcccgcagagctccgggagcaaacagtcagcatgacacatctctaaactgatctacaaagtgatgaaaatcttgtctatgctctgcctacggggctttgtgacgtatctctgcactgattacccagcggatgggaattttgtctaggctctgcctatgggggcattgtgacatatctctacactgatcacccaggtgatgtaactcttgtgtaggatctgcctatgggggcattgtgacatatttctgcactgataacccagatgatgggactcttgtctaggctctgtgtgtgggggctttgtgacatatctctgcactgatcacctaggtgatgtaacgcttgtttagactcttcctacggggcatagtgacatatcactgcattgatcactgaggtgatgtaactcttgtccaggctctgcctatagggggccttgtgacatatctctgcactgatcatctcagtgatgtaactcttgcttacactctgccttcagggg

SEQ ID NO: 43147 - DNA, 770 bp, Artificial sequence
  DNA replication origin
gacaagggcacagagaggcgagcgggctccttgcacatcagccagggtgtgcaatgagcgcaggtctagccaggaggccggcaaagagagctagaggtctgcgttccgccgccaggctatccattgtggcagctaggaggctgcagaggcacacgcgggctggcaacggtggcgtggaggcgcacacaaggcgagcctccggagggctgtcaggactggatgctgcaggggcccagtgtttcgctggacgggtttctccaaccagcccaggggaggaagcattttccgtgggtggggggtgggggtggggtgggtctggtcaggcgggggtggggtggtggaaaggcatgagggctctgcccgggctgctcccacagcccaggcagctgcccacaaacctgcgcgtgcgcagtgggtggcccacctgtttgtacctgggccggatctggtatccccaggatgcccaggaaagaatggcagttctctgctgtatggattctcttaccgggcctagaccaagaaggcaggaatcccaggccggtcagcccagtggagggggcgggtggaagacacgcccctccatagccagcaaggtgttccccacgaaagagaggccaccgccctgccccgacctgacaccgtcccaaccccgcgacctaaattcctccatcagagcccagtattcttccttgctgaggggtgcttccagcaaggtggcctcttccaaggcctccagctcccccggggcctccatttctaggaaaggttgc

SEQ ID NO: 43148 - DNA, 857 bp, Artificial sequence
  DNA replication origin
ttcgtggggaacaccttgctggctatggaggggcgtgtcttccacccgccccctccactgggctgaccggcctgggattcctgccttcttggtctaggcccggtaagagaatccatacagcagagaactgccattctttcctgggcatcctggggataccagatccggcccaggtacaaacaggtgggccacccactgcgcacgcgcaggtttgtgggcagctgcctgggctgtgggagcagcccgggcagagccctcatgcctttccaccaccccacccccgcctgaccagacccaccccacccccaccccccacccacggaaaatgcttcctcccctgggctggttggagaaacccgtccagcgaaacactgggcccctgcagcatccagtcctgacagccctccggaggctcgccttgtgtgcgcctccacgccaccgttgccagcccgcgtgtgcctctgcagcctcctagctgccacaatggatagcctggcggcggaacgcagacctctagctctctttgccggcctcctggctagacctgcgctcattgcacaccctggctgatgtgcaaggagcccgctcgcctctctgtgcccttgtccatctgtgaaattctggctgaggttctcccaacacattccgacgctctttagtcaaagtctggagaatggttacatctcctggatgatcggttcagaaatatgtcccaatgccccctccctccggagcctagagaagatttgcatcatttgggtgatcagcgcagagatatatcacaatgtcccatgtacaaaaagcctggaaatgatttacatcacctcggtgatcagtgcataggtatgtcagatatc

SEQ ID NO: 43149 - DNA, 1338 bp, Artificial sequence
  DNA replication origin
accctggactctggaatgccgatggcctgggccagccgttcactggtggccatgccaggatacgggttcctctcaaagcagcctcgcagggcctccctttggctcggggtccaaacgagtctcctttgccgtccccgtccccgggcttccgcggggagggtgctgtccgaagttgtcaggagggccatcgcagggagccccagccggaatttcatggacggacatgggcagagagaggtctgcgggctcccgtgcacctcagccggcgagtgcgctgcagcaggtgcagccagggggactgcccggacagccagccagcggctcttataaaggcccgcaggcaggcaggttccacccctttatgaatggcggtgagcccagtaacagcctgacacaccccagaagggtctcagggcgtcgcggcctgcggccgggggctggtggggtgggggaggagggcgtgggtgggtccagagacacgaagaggaagggggcgagggggaagtgctgaagggggcgcgttttgggggctggctctccggacctctccaggaatccagcaggaactggaagccgctctctgggctcccatgagtcttcagcagggagaaactggcctgggtgggtggaggggagtgtggaactgaactttcgtgggagtcctgagtgttccagaccctctctccgtgaaggaggcagtgcctgtggctgtcgccattgccgggacagtctcacacaggcaggcttgtggctctggtttatttccacgtaggagaccagagggagaccccagagagaagatgcctccccggagtgatggcctgacgatggattcccgtgtgcggcaacatggggagtctgcagtgtgaccggtttggaaactggcaatgagagagaaggcaccatgccggtcttcaacccttcccttcatgtttccgggtgcccgcagagctccgggagaaaacagtcagcatgacacatctctgaactgatcaacaaagtgatgtaacagttgtctaggctctgcttacagggctttgtgacatatctctacactgatcacccagctgatgggactttattctaggctctgcccatgggggcattgtgacatatctctacacctatcacccaggtgatgtaactcttgtgttagatctgcctatggggacattgtgacatatttctgcactgatcacccaggtgatgggacccttgtctaggctctatttatggggactttgtgacatatctctgcactgatcacccaggtgatgtaacgcttgactaggttctgcctacggggcatagtgacatatcactgcattgatctccgag

SEQ ID NO: 43150 - DNA, 900 bp, Artificial sequence
  DNA replication origin
gccctgagcacctgtggctctccaacagggggctttcgtgagccagggagcaagggacgtccccgtgctccagtccagcttggccgcaccggcataggggatctcccaacctgccctggcttgtaggggtttttcctgtgcctccccgggtcctccgtaaggaacgctttcccagcctcaggctcctcggtggcctccgcacccgggcaaaagccgagaggactgggacccgcagagcgacggcctgccgggcccttgtgcagtgggacagcctgggcccgctcaagcggggccacaaggccaaggtgtgcttgcatcacctgcgtcccaggggagtccgcggtggggctggtgccggggtccccaggtcaccggggcggcgtgggaaccccacgccggggtagctccacctcgccagcccgcgcccccggaggcctccgagtggcaggggcagatgcaaggcatccgggcgccttcccaggcgctccaggagccggggcgctcgtctgcactcccctccggcctgctgcaggatgagctcctggcgagcccggagtttctgcagcaggagcaacctttcctagaaacggaggccccgggggagctggaggccttggaagaggccgcgtcgctggaagcacccctcagcaaggaagaataccaggttctgctggaggagctttaggatgcattgttgggacggggtcgggtcggggcaatgcggtggcctctctttcgtggggaacacctgtctggctatggaggtgcgtgtcttccccccaccccctccaccagactgactggcctgggattcctgtcttctatgtctaggcccggtgagagactccaaacagcggagaactgccattctttcctgggcatcctggggatcccagagcc

SEQ ID NO: 43151 - DNA, 877 bp, Artificial sequence
  DNA replication origin
gtggggaacacctgtctggctatggaggtgcgtgtcttccccccaccccctccaccagactgactggcctgggattcctgtcttctatgtctaggcccggtgagagactccaaacagcggagaactgccattctttcctgggcatcctggggatcccagagccggccccggtaccagcagctgggccgcatactgcacatgtgcgggtttgcgggcagccgcctgggctgtgggagcagcctaggcagagctctcatgcctttccaccaccacacaccagcctgaccaccccctcacgaaccgcacccgccacacccggaaaatgcgtcctcccatgtgctgggtggagaccaccgtcccgcgaaacaccgggcctgtgcagcgtccaggcctgacacccctccagctgctcgcttcctctgcgcctccgcgccaccgtcgcaggcccgcccgtgcccctggagcctcccagctcccaccatggagtgcctggaggcagaacgcagacctctagctctctttgccggcctcctggctagacctgcgctcattgcgcaccacggctattgtgcaagggagcctgctggactctctgtgcccttgtccatccgtgaaattccagctgaggctctcccaacaccttccgacgctctgtagtcagagcctggagaatagttatatctcctggatgatcggttcaggaatatatcaaaatgcccgctccctgcggagcctagagaagatttgcatcatttgggttaccagtgcagagatatatcacaatgtcccctgtacaaaaagcctggaaatgatttacatcacctaggtgatcagtgcataggtatgtcagaaatccccagtaggctaaacatagaca

SEQ ID NO: 43152 - DNA, 951 bp, Artificial sequence
  DNA replication origin
ggcctgacgatggattcccttatgcggcaacttggggagtctgcagtgtggccggtttggaaactggcaaggagagcgaaggcaccatgccagtgttccacccttagctgcatgtttccgagtgcccgcagagctgccggagcaaacagtcagcatgacacatctctgaactgatcaacaaagtgatagccgggcgcggtggctcacgcctgtaatcccagcactttgggaggccgaggcgggcggatcacgaggtcaggagatcgagaccatcccggctacaatggtgaaaccccgtctctactaaaaaaaatacaaaaaaattagccgggcgtagtggcgggcacctgtagtcccagctacttgggaggctgaggcaggagaatggcgtgaacccgggaggcggagcttgcagtgagccgagattgcgccactgcactcccacctgggccactgagcgagactccgtctcaaaaaaaaaaaaaaaaaaaaaaaaaagtgatgtaactcttgtctaggctctgcctacaggggctttgtgacatatctctgcactgatcacccaggtgatgggactttgtctaggctctgcctatggggacattgtgacatatctctacactgatcacccaggtaatgtaactcttgtgttggatctgcctatgggggcattgtgacatatctctacactgatcacccaggtaatgtaactcttgtgttggatctgcctatgggggcattgtgacatatttctgcactgatcacctaggtgatgggacacttgtctaggctctgtgtatgggggctttgtgacatatctccgcactgatcacacaggtgatgtaacgcttgactaggctctgtctacggggcataatgacatatcactgcattgatcaccgaggtgatgtaactcttgtccaggatctgcctatagggggccttgtgaca

SEQ ID NO: 43153 - DNA, 585 bp, Artificial sequence
  DNA replication origin
cacaggcagacaggctccaccccttcatgaatggcggtgagccctgggacagccagccccaccccggaagggtcccagggcgtcgaggcctgtggccggggggttgtggggtggggagggagggcgtggtgatgctggtggtggggccggagagacgaagaggaagggggcgagggggaaggggtgatgggggctggctctccggacatctccaggaatccagcaggaactggaagccgctctctgatctcccaggcgtcttcagcagggcgaaactggcctgggtgggtggaggggagtgtggaactgaacctccatgggattcttgagtgttcccggccctctctccatgaagaaggcagtgcctgtgggtgtcgccgttgccgggactgtctgaaacacgcaggcgtgtggctctcgttcatttctaagtaggagaccagaccgagaccccagagagaagatgcctctccggcgtgatggcctgacgatggattcccttatgcggcaacttggggagtctgcagtgtggccggtttggaaactggcaaggagagcgaaggcaccatgccagtgttccaccct

SEQ ID NO: 43154 - DNA, 1183 bp, Artificial sequence
  DNA replication origin
gaacataaatagaaacttgataaacagtatatggcccttgatattggcattgcagctcaactagaggaaatgactgatgctcattagtggttctggaacatttgatttaccttataaaaaataaataagtgaaaatattgtgatatatcactgcactgatcacccaaatgatgcaaatcttctctaggctccgcagggagggggcattgtgacatatttctgaaccgatcatccaggagatataagtattctccaggatttgacaaaagagcttcggaaggtgttgggagagactcagccggaatttcacggacggacaagggcacagagaggacagcggtctccgttgcacgtcagcctgggtgcgcaatgagcgcaggtctagccaggaggccggcaaagagagctagaggtgtgcgttccaccaccaggcactccatgggggcagctgggaggctgcaggggcacaggcgggccgggtacggtggcgcggaggcgcagaggaggcgagcggccagaggggtgtcaggcctggacgctgtgcgggcacggtgtttcatgggacgggggtctccacccagcccaggggaggacgcattttccgggggtggtgggtggtggtgggggtgggtggtcaggcgggggtggggtggtggaaaggcatgagagctctgccccggctgctcccaaagcccaggcggctgcccgcaaacccgcgggtgcgcagtaggcggcccacctgctggtacctgggccggctctgggatccccaggatgcccaggaaagaatggcagttctccgctgtgtggagcctctcaccaggcctagacctagaaggcaggaatcccaggcaggtcagcccggtggagggggcggggagaagacacgcacctccatagccagccaggtgttccctgcgaaagagaggccaccgccctgccccgatccgaccctgtcccaaccccgcatcctaaagctcctccagcagagtccggtattcttcctcgctgaagggtgcttccagcaaggcggcctcttcgaaggcctccagctcccccggggcctccgtttctaggaaaggttgcgcctgctgcagaaactccgggctcgccaggagctcatccagcagcaggccggaggggagtgcagacgagcgccccggctcctgaagcgccttggagg

SEQ ID NO: 43155 - DNA, 814 bp, Artificial sequence
  DNA replication origin
ctctttcgcagggaacacctggctggctatggaggtgcgtgtcttctccccgccccctccaccgggctgacctgcctgggattcctgccttctaggtctaggcctggtgagaggctccacacagcggagaactgccattctttcctgggcatcctggggatcccagagccggcccaggtaccagcaggtgggccgcctactgcgcacccgcgggtttgcgggcagccgcctgggctttgggagcagccggggcagagctctcatgcctttccaccaccccacccccgcctgaccacccacccccaccaccacccaccacccccggaaaatgcgtcctcccctgggctgggtggagacccccgtcccatgaaacaccgtgcccgcacagcgtccaggcctgacacccctctggccgctcgcctcctctgcgcctccgcgccaccgtacccggcccgcctgtgcccctgcagcctcccagctgcccccatggagtgcctggtggtggaacgcacacctctagctctctttgccggcctcctggctagacctgcgctcattgcgcacccaggctgacgtgcaacggagaccgctgtcctctctgtgcccttgtccgtccgtgaaattccggctgagtctctcccaacaccttccgaagctcttttgtcaaatcctggagaatacttatatctcctggatgatcggttcagaaatatgtcacaatgccccctccctgcggagcctagagaagatttgcatcatttgggtgatcagtgcagtgatatatcacaatattttcacttatttattttttata

SEQ ID NO: 43156 - DNA, 1710 bp, Artificial sequence
  DNA replication origin
atcgcaaacatttactttggggccggccaattaaaggttaaatgtccaaacctagaaaccgccaactgccaagggggccgcggtgggcgaggggctgggcgccggcgtggagcgcagccactggcggttcctgggtctctctccttggtagctggggctggacaccaggaggcgcgcgggcttgcgggcaggggctgcagggctgaggagctgacccgcgcctaccagggctgggcggaggcggggccgggcttcaggacagaggccaatcgctgccctccgggcccccagcgccggctttgggcagaggcagccagggcgccggaagaggtgcgggggctgcagcggggtgcaggggatcgtatgcagtggaggaggcctgggcgcggctgggggccggggggcgctgaggctgcccgaacgcctaggaggtctcgagggtgggtggcgtacagcggggcgcgggcggaacccagaggcagaggctgggggctgggggaggggcgccggccttggagtgcagaggtggggcgagaggcgctgggagctggaggtcagagagaggttgcccaaaagcaaaggcggggaggggtgcggggcgcagggataggctagcggcgcttgcgggtgggtgggccgagccgaggcgccgagtgctgaggagtacaggtggtccaggcgcagtgggcacggggagacggaggctgcctcagtatggaggacagacgggggcggggacgtagagctgagaggcttggggagggaggcgcaggcccaaggcagaggctgcgggagcgcgcggggagggagaggtgcagggcgtggaggggattcgggggcgcttggagaggatgggcagaaggccgggacggggaggaggggcggcgagaggcgcaggagtgggctggggtggggcggcactggagtgacgggggagggggcgcctggcctggggacacgggcagaggcagctcaagctcggaggaggtgcagatactggggtccgggagcgcaggggtgggccagggagtggagaggggtgaccgggtcggggggcagctgggttgggggaagaggatgtaccagtactccaagcaagtgcgctgggcgacggggcagctgctgacaccgctgaggtcgggcggtgttccgcgtgcggtgtcgttgctgggcgcatgggtattaagaatcagcggggtcgcaggtgactgtggggaggacagggggtcaaggggcccctggccagagggcacgaggctgacctagagcgccgaggaggaattgcggggcgtgggggtctcaggggcgtcgggggaggccggggccccatggggcgcaggtgacatggagtgagtaggaggccgggggtgacaccggcgaggcctgcagccgagggtgtcgaggcagccacgctgtcgcccccaggcctggaaatccacgcggcttcccaaagacggcgcctctgttctgcgggttcgtgacgaggatttatttccacccactgcgcctgggcgcaggtctgcgggtccgcgcccactgcgtgcggcgccacggaccatgtcgggtgagtagctcaagctccttcagttcagcctgcctgttcctactggcatgggtgagagattggtctgcactggggagaaccccactttgaccgcaggattgccccaaaccccaagtctccccctcactccctcgcccaggtctctc

SEQ ID NO: 43157 - DNA, 1150 bp, Artificial sequence
  DNA replication origin
agtggacacagcacatgtttcagagagcacagggttgggggtaaggtcacagatcaacaggatcccaaggcagaagaatttttcttagcacagaacaaaatgaaaagtctcccatgtctacctctttctacacagacacggcaaccatccgatttctcaatctttccccacctttccccgctttcgattccacaaaaccgccattgtcatcatggcccgttctcaatgagctgttgagtacacctcccagacggggtggtggccgggcagaggggctcctcacttcccaggaggggcggccgggcagaggctcccctcacctccaggacagggcggctggccgggcgggggctgacccccccacctccctccgggacggggcggctgccgggcggggggctgaccccaccacctccctcccggagtgggtggctgccgggcggagacgctcctcacttctcagacggtgtggctgccgggcggaggggctcctcacttctcagacggggcggttgccaggcagagggtctcctcacttctcagacggggcggccgggcagagacgctcatcacatcccagacgggatggcagggcagaggcgctcctcacatctcagacgatgggcggcctggcagagacgctcctcactttccagactgggcagccaggcagaggggctcctcacatcccagatgatgggcggccaggcggagaggctcctcacttcctagacggggtgggggccgggcagaggctgcaatctcggcactttgggaggccaaggcaggctgctgggaggtggaggttgtagcgagccgagatcacgccactgcactccagcctgggcaccattgagcactgagtgaaccagactccgtctgccatcccggcacctcgggaggccgaggctggcggatcactcgcggttaggagctggagaccaggctggccaacacagcaaaaccccgtttccaccaaaaaaatacgaaaaccagtcaggcgtggcggcgcgcgcctgcaatcgcaggcactcagcaggctgaggcaggagaatcaggcagggagggtgcagtgagccgagatggcagcagtacagtccagctttggctcggcatcagagggagactgtggaaagagagggagagggag

SEQ ID NO: 43158 - DNA, 861 bp, Artificial sequence
  DNA replication origin
tgaggagcccctctgcctggctgcccagtctggaaagtgaggagcgtctctgccaggccgcccatcgtctgagatgtgaggagcgcctctgccctgccatcccgtctgggatgtgatgagcgtctctgcccggccgccccgtctgagaagtgaggagaccctctgcctggcaaccgccccgtctgagaagtgaggagcccctccgcccggcagccacaccgtctgagaagtgaggagcgtctccgcccggcagccacccactccgggagggaggtggtggggtcagccccccgcccggcagccgccccgtcccggagggaggtgggggggtcagcccccgcccggccagccgccctgtcctggaggtgaggggagcctctgcccggccgcccctcctgggaagtgaggagcccctctgcccggccaccaccccgtctgggaggtgtactcaacagctcattgagaacgggccatgatgacaatggcggttttgtggaatcgaaagcggggaaaggtggggaaagattgagaaatcggatggttgccgtgtctgtgtagaaagaggtagacatgggagacttttcattttgttctgtgctaagaaaaattcttctgccttgggatcctgttgatctgtgaccttacccccaaccctgtgctctctgaaacatgtgctgtgtccactcagggttgaatggattaaggatcgtgcaagatgtgctttgttaaacagatgcttgaaggcagcatgctcattaagagtcatcaccgctccctaatctcaagtacccagggacacaaacactgcggaaggccgcagggtcatctgcctaggaaaaccagagacctttgttcacttgt

SEQ ID NO: 43159 - DNA, 1333 bp, Artificial sequence
  DNA replication origin
gggcgcccatctactcccctatctccctgagcagcaactaagtttaggcccagctgccagacctcagagatctcaccagcagggtgcttcccatgttgatgacaataaaatgaatgtgttgcaaaccgatctgagtgactccgtgttctctgatggtgaggagggagggaggggggggtaagaggtgtgtggggagggagggaggaagaggtggtgtgtggggagggagggaggcagaggtggtgggtggggagggaggaaggaagaggtggtgtgtggggagggagggaggaagaggtggtgtgtggggagggagggaagaagtgtgtcaggagggaggcaggcgggaagaggtggtgtgtagggagggagggagggaggcagaggtggtgggtgggcagggagggaggaagaggaggtttgtggggagggagggaagaagtggtgtggggagggaggaaggggtgggtggggagggagtgaggaagaggtggtgtgtggggagggaggaagaggtggtgggtggggagggagtgaggaagaggtggtgtgtggggtgggagggagggaggaagatgaggtgtgtggggagggagggaggaagaggtgtgtgggaagggatggaggaagaagaggtgtgtggggagggagggaggaagaagaggtgtgtcaggagggagacaggggggaagacgtggtgtgtggggagggagacaggaatacgtggtgtgtagggagggagggaggaaaaggtgtgtggcggggaggtaggaagaggtggtgggtcgggaggcagggaggaacagaaggtgggtggggagtgagagagggagaaagaggtggtgtgtagggagggagggaggaagaggtggcctgtggggagggaggaagggtggaagaggtggtgtgtggggagagagggagaaaaaggtggtatgcagggagggagggaggaagaggtggtgtgttgggagggagagaggaagaggtggcctgtggggagggaggaaggggggaagaggtggtgagtggggagcgagaaacgaaagaaggaaggaagaggtgttgtgcggggagggagggaagtggggtcttgcgggcttgagggcagagggagaggtcacagtttgccagacaggagcataaggtttgcgtcatggctgagcactggagacaaatttccccctcacaggatgactctgcttcatttagggtttattttttcttgcaatcctgccagcacaagcaccaagtaccaggatctggattctacctacttaggtttcattgttaaaataccttttcctcaatataaactgatggtacaatggtt

SEQ ID NO: 43160 - DNA, 1282 bp, Artificial sequence
  DNA replication origin
tgccagacctcagagatctcaccagcagggtgcttcccatgttgatgacaataaaatgaatgtgttgcaaaccgatctgagtgactccgtgttctctgatggtgaggagggagggaggggggggtaagaggtgtgtggggagggagggaggaagaggtggtgtgtggggagggagggaggcagaggtggtgggtggggagggaggaaggaagaggtggtgtgtggggagggagggaggaagaggtggtgtgtggggagggagggaagaagtgtgtcaggagggaggcaggcgggaagaggtggtgtgtagggagggagggagggaggcagaggtggtgggtgggcagggagggaggaagaggaggtttgtggggagggagggaagaagtggtgtggggagggaggaaggggtgggtggggagggagtgaggaagaggtggtgtgtggggagggaggaagaggtggtgggtggggagggagtgaggaagaggtggtgtgtggggtgggagggagggaggaagatgaggtgtgtggggagggagggaggaagaggtgtgtgggaagggatggaggaagaagaggtgtgtggggagggagggaggaagaagaggtgtgtcaggagggagacaggggggaagacgtggtgtgtggggagggagacaggaatacgtggtgtgtagggagggagggaggaaaaggtgtgtggcggggaggtaggaagaggtggtgggtcgggaggcagggaggaacagaaggtgggtggggagtgagagagggagaaagaggtggtgtgtagggagggagggaggaagaggtggcctgtggggagggaggaagggtggaagaggtggtgtgtggggagagagggagaaaaaggtggtatgcagggagggagggaggaagaggtggtgtgttgggagggagagaggaagaggtggcctgtggggagggaggaaggggggaagaggtggtgagtggggagcgagaaacgaaagaaggaaggaagaggtgttgtgcggggagggagggaagtggggtcttgcgggcttgagggcagagggagaggtcacagtttgccagacaggagcataaggtttgcgtcatggctgagcactggagacaaatttccccctcacaggatgactctgcttcatttagggtttattttttcttgcaatcctgccagcacaagcaccaagtaccaggatctggattctacctacttaggtttcattgttaaaataccttttcctcaatataaactgatggtacaatggtttcc

SEQ ID NO: 43161 - DNA, 1123 bp, Artificial sequence
  DNA replication origin
tgcaaagttgctgagccaatgaaataagagatcatttataaagttgtgagtatatcctaattatatgacagctggtggctattacaattgttgttatgaaacaagccagtttttaccatgaacagctaatcactgtttcatctcagactctcagcacatggcctttataaacacttctgaaaagtgaacagagcaacaagcaacttgcacaaaatgtgacaggactaagagccttgcaggtgagcatgtgttttattaagaagcagtgatgatgcaaggtgcacattagagatggcactcagcactctgcatggtgagctccagctgtgattccactcaaggagagaagcttcagtgggcagggccagtgggcacccctcctggtgaatgtggtgcaagacactgtagaggcccaagatgctggcatccccagttgtatccattatgggcacacggacccctcgcaggtcctggagggagggggctatgccagaggaaacatcaggagggaaagaaaaaaggaaaagagggagggagggcagaagaggaggaggcagtttaggaggaggacaggaagacaggaaaagagagaaggacagaaggaagtgaaggaagcagagatggagggagtcaaggaggaaaggaaggacaatagggaaagagagaaggaggaaatgaagggagggaagaagagagaaagggagttgaggaggaggtcaggaaggaagacagggaaaaagagaagaaggaaaggaaaggaaggaaggagacagggagagagttgaggaggaggttaggaggaagatggaaagagaggaggaggaacagaagaaaggagagagggagagtaaaggagagcatcaaggaaggcagagaaacagtgaaggggaaaggaaaggcagcaagaagagaagaagggagtcaaggaggaggacaggaaagaaggaagagaaaaaggaagacaggggaaagacaaaggaagagagggggaaagaaagggagggaaggagaaagggagggagtctaagaggacagaaaatgaggaagaaaggaggaaaggaagggaaggaaggagaaagggagagagtggcaagcgaggagggaattgtttgaagtcaggaac

SEQ ID NO: 43162 - DNA, 1064 bp, Artificial sequence
  DNA replication origin
cgcggcaccttggaaagcccgagggtggggacgtgagcctcccaatgcacagcgggcgccgatgagctctcgcgagagacacccactgcgtgatccggggctcaggggtgggtgggcatgagcgggccagggaagaggttctcgggaacaggagaaaggaaggaaggtatatgtcaagggctgaattacacaggacacaccacatcacacaccacatcaccaggtcctccgcacacgggtgcagagagccttgtgtggaggtctgactttcaatagatagcagcgagggagctgctctgctccatggaaaaccctgacccagaagcaggacgtctgcgaatagtttagcatcaggttccccacaaacacgttatgtgatgggtcagggggtgaccgcctttctggcagcagcccgtttcccaggatgggggtttctctgcaccggatcccggtttccggagcacggcaggacatgcgcccagcgcggggcggagcggcacaccggaggggactgcagaagactgcctacccgaggccaacaaaggttccgtggcgctgccttatcattcctcatgggcgggattcttagagtccttcagtcctaatcccgcttatagtagctttaccccattggctcctcagacaaggacatacaccaaatgtctgaacctgtgatttctctactaatgagcaggattaccatgggaacaacacatgggcaacaacacatggggaacacacgcagtaaaactaacctgtctcacatgggtctaaccataatgctttccagggcatgcgcaccgctctcaggtgaatccattccagtctgccttgtccttcgcaaagaaaagagagctctgcaggggcggtggctcatgcctgtaatcccagcaatttgggaggttgaggagggccgatcatctgagatcaggagttcaagatcagcttggccaacatagtgaaaccctgtctctataaaaatacaaaaattagccgggcatgatggcgggtgcctgtaatcccagctacccaggaggctgaagtgggagaatcgcttgaacccg

SEQ ID NO: 43163 - DNA, 1057 bp, Artificial sequence
  DNA replication origin
cggcaccttggaaagcccgagggtggggacgtgagcctcccaatgcacagcgggcgccgatgagctctcgcgagagacacccactgcgtgatccggggctcaggggtgggtgggcatgagcgggccagggaagaggttctcgggaacaggagaaaggaaggaaggtatatgtcaagggctgaattacacaggacacaccacatcacacaccacatcaccaggtcctccgcacacgggtgcagagagccttgtgtggaggtctgactttcaatagatagcagcgagggagctgctctgctccatggaaaaccctgacccagaagcaggacgtctgcgaatagtttagcatcaggttccccacaaacacgttatgtgatgggtcagggggtgaccgcctttctggcagcagcccgtttcccaggatgggggtttctctgcaccggatcccggtttccggagcacggcaggacatgcgcccagcgcggggcggagcggcacaccggaggggactgcagaagactgcctacccgaggccaacaaaggttccgtggcgctgccttatcattcctcatgggcgggattcttagagtccttcagtcctaatcccgcttatagtagctttaccccattggctcctcagacaaggacatacaccaaatgtctgaacctgtgatttctctactaatgagcaggattaccatgggaacaacacatgggcaacaacacatggggaacacacgcagtaaaactaacctgtctcacatgggtctaaccataatgctttccagggcatgcgcaccgctctcaggtgaatccattccagtctgccttgtccttcgcaaagaaaagagagctctgcaggggcggtggctcatgcctgtaatcccagcaatttgggaggttgaggagggccgatcatctgagatcaggagttcaagatcagcttggccaacatagtgaaaccctgtctctataaaaatacaaaaattagccgggcatgatggcgggtgcctgtaatcccagctacccaggaggctgaagtgggagaatcgcttga

SEQ ID NO: 43164 - DNA, 1083 bp, Artificial sequence
  DNA replication origin
actcggggggcgccgacttctaacacacaacaggggcgccttcgctgttcggttctggtcgtagttgttattctcagcgtccctattattattagtagtagtattctttttattttatttatttatttatttttgagacggagtcttgctcagtcgctcaggctacagtgcaatggcgcgatctcagctcactgcaagttccgcctcccgggttcacgccattctcctgcctcagtctcccgagtagttaggactacgggcgcccccaccatgcctagctaaatttttttggtatttttagtaaagacggggttttaccgtgttagccaggatggtctcgatctcctgacctcgtaatccgctcaccttggcctcccaaagtgctggtattacaggagtgagccactgcgcctggccagcgttcctattattattgctcttctggaatgagagcaggcagctgccgggatcccagccggaaggggcgggcgaaaggcagggttgctgggggcgggcgaaaggcagggttgctggaggcgcgcgtaggttcgagtagggactggaatgcgggccaacagtgtgggggttattaggggggagggtaggcaggtcggaggagggagttgggaggaaagcggcggcggtggcggcttcaacagcagctcttgcccttaaggaacaatgtgagacgttgcctgaaatgttaatttccgtttctcatttcatcatccagggcgttggggaagggagtggggagtgatgtgagagtgtgtgtatgtgtgtccctgccacttggattctgtgtgtgtgtgtgtccctgccacattcagtcgtgtgtgtgtccctgccacatggattcagtcttgtgtgtgtgtgtccctgccacattgattcagtcctgtgtgtgtgtatgtgtgtgtgtccgtacctgccacattgtttcaatcccctctcagagggattgtgctgttaacgcttgtatctgtgtcatttgggaaggtcggtggcaggggagtctaggtttttctctaggcctgctcttttcctggtgcccgattgacgttttctgcttctgttgtgttt

SEQ ID NO: 43165 - DNA, 1117 bp, Artificial sequence
  DNA replication origin
gcgccagcgctgtctgagctgtcgctgtcggcgcctgcgctgtctgcctttgcgagggcggagctgagttatcctcagcacagaccccgagagcaccgcgagggtggagctgagttctcctctgcacagacttcggagatacagggaaggcagagcagtgttctcctcagcacggacccggtcgggcgggccggtggcaccccgagggcggagctgcgttctgctcagcacagaccttgggggcactgccgcgctttgggacaactcggggccgcatcaacggtgagtaaaatacttcctgtttgcagctctgaggtgggtggcagcggtggacgctgcagccagccagagtgtagaaaggcgtcagggtaagtgcgctttccaggctgcactgcgggtggcctgggacgggttgggggccctatctcaggcgtcactgcccgccttgggtggctggttgggtgtgctatctggggctgtgctgcctgcccccggggggtgctttgggggcccaaaccggggctgcactggccttggcggggagccggttgggggcactatcccagactgtattgctggcaacagtgaggtgggctaagtgtgctatccggggctgcactgcgcggctgttggagggggggtggcggtttcgagttgagggcgctatggggtgctgtaatgcccatggtgcggggaggcggggcggtttgggtgtgttgggtgtgctattgcggggggcgacactgctggtggtagggggcagggtgggttgggggccatatcaggggctgcactgattgctttagctaggatttctggtactatgttaaacaacagtggtgacagggggcatccttattatgttccagatcttagaggaaaagctttccatttttaccgactccatatgcttctagctgtgggtgtctttcctgtagcttttattatgttgcggtatgttccttctgtacccgtttctttgaggatttatagcatgaagccatgttgaatttcatcaaatgctttttcagtttcagttgacatgatcatactgtttttgtcgtttatttggttgatatgatgtatcacattgtatgttgagtgacccttgcatccc

SEQ ID NO: 43166 - DNA, 947 bp, Artificial sequence
  DNA replication origin
aggggattgaagtggcttggagtgcaatggagcggagtggaatggaatggaatggaatggagtggaatggaatcgaatcatatggaactgaatcaaatcgaattgaatgaaattgaatggaaaaaatggaatccaatggaatcaaatcgaatggattcgaatgacattgaatggaatcgaaatgaatgcagtgaggtggagttgagtggagtggagtggaatggaatgggatgaatggaattgactggagaggagtggaatggaatggaatggaaagcaatggaattgaacaaaatggagtgtagtagaatgtagtggattggagtggagtgccggggagtgcagtgaaatgaagaggattgtagttgaatggaatggaatggtatggaacgtactggaatggaatggataagaacggaatggaatggaatcgcatggaattgaaaagaatcaaatcgaattgaatagaatcaaatggaaaaaatggaggcaaatggaatcgaatgtcatagaatcgaacggttttgaatgtcagtgaatggaaacgaatggaatgcgatgaagtggagtggagtggagtggaaaggagtgcaatggaatagggtggaacagaatttaatggaacagagtggattggagtggactggagtggaatggaaagggaaggaatgggattgaaaagagtggcgtgcagtggagtggagtggcacggagtggagtggagtggagtggagtggaatggagtggaatggaatggagtggaatggagtggattggaatggaatggagtgcagaggaatggaatggaatggtatagagtggacaggaatggagtggagtggattggaatggaatggaatgtaagggaatggaactgaatggactggaatggaatggaatagaatggaatcgcagggaatcaaattggattgaatcgaatcgaatgg

SEQ ID NO: 43167 - DNA, 864 bp, Artificial sequence
  DNA replication origin
aagtggcttggagtgcaatggagtggagtggaatggaatgtaatgcaatggaattgaatggaatggaatgtagtggaatggaatcgaatcacatggaactgaatcaaatcgaattgaatgaaattgaatggaaaaaatggaatccaatggaatcaaatcgaatggattcgaatgacattgaatggaatcgaaatgaatgcagtgaggtggagttgagtggagtggagtggaatggaatgggatgaatggaattgactggagaggagtggaatggaatggaatggaaagcaatggaattgaacgaaatggagtgtagtagaatgtagtggattggagtggagtgccggggagtgcagtgaaatgaagaggattgtagttgaatggaatggaatggtatggaacgtactggaatggaatggataagaacggaatggaatggaatcgcatggaattgaaaagaatcaaatcgaattgaatagaatcaaatggaaaaaatggaggcaaatggaatcgaatgtcatagaatcgaacggttttgaatgtcagtgaatggaaacgaatggaatgcgatgaagtggagcggagtggagtggaaaggagtgcaatggaatagggtggaacagaatttaatggaacagagtggattggagtggactggagtggaatggaaagggaaggaatgggattgaaaggagtggcgtgcagtggagtggagtggcatggagtggagtggagtggaatggagtggaatggaatggagtggaatggagtggattggaatggaatggagtgcagaggaatggaatggaatggtatagagtggacaggaatggagtggagtggattggaatggaatggaatgta

SEQ ID NO: 43168 - DNA, 855 bp, Artificial sequence
  DNA replication origin
tcaaatgaatgaagtggattggtatggaatggaatggcgtggaatggagtggaatagaatggaatggaatcgcatagaatgatatcaaatcaaatcgaatcgaacggaaaattatgaatccaatggagtcggaaggattataaaggaatggattcgaaagacattgaatggaatggaaaggaatgcagtgaagtggagtggagtggaatgttttagagtgaactggggtggattggaactctatggagaggagtggagtgaagtggattggagtggaatggagtgcaatggactggagtggattggaatggattggagtggagtggagtggatcggagtggagtgccgtggaggggactagagtggggtggagtggagtgcattggagtggaatggagtggcgtggggtggaatggaatggaatgggatcaaatcgcatggtaatgaatgaaatggaatcaaatggaatggaaataatggaatcgaaggcaaacgaatggaatcgaattgcacagattctactgacttcgaacaaaatgaaatgaaatgcggtgaagtggagtggagtggaatgtattggttggaatggaattgaatggtgtggagtggagtggagttcccaggagtggaatgggaagaaatggaattgaacggagtggagtggagtggaatggggcataatggagtggaatagtgtggagtggagtagagtggaatgggttggagtggaatgcagaggacaggagtggagtgcggtggactggagtggagtgaagttgagtggagtggattggattgaaatagagcggagcagagtggaatggaattgaatcacatggtattaaatcaaatcga

SEQ ID NO: 43169 - DNA, 781 bp, Artificial sequence
  DNA replication origin
atcaaatggttttgaatggcatcaaatgaaatggcatggaaggcagtgaattggagtggagtggaatagagaggaatgaattggaatggagtgtagtggaatggcgtggattccagtggagtggagtggattggattggaatggaatggaatagattggattggagtggtgcagagtggagtggactggagtgcagaggaatggagtggagtgaagtccagttgagtggaatggaatggagtggagcagagtggaatgcaaaagaatgaagtggattgttatggaatggaatggcgtggaatggcgtggaatagaatggaatggaatcgcatggaatgataccaaatcaaatcgaatcaaacggaaaattatgaatccaatggaatcgaaaggattctaaaggaatggattcgaaaggcattgaatggaatggaaaggaatgcagtggagtggagtggagtggaatattttagagtgaacttgggtggattggaactctatggagaggagtggagtgaagtggattggagtggaatggagtgcaatggactggagtggagtggaatggattggagtggagtggagtggatcggagtggagtgccgtggagtggactagagtgaggtggagtagagtgcattggagtggaatggagtggagtggggtgcaatggaatggaatggcatcaaatcgcatggtaatgaatcaaatggaatcaaatggaatggaaataatggaatcgaaggcaaacgaatggaatcgaattgcactgattctactg

SEQ ID NO: 43170 - DNA, 2097 bp, Artificial sequence
  DNA replication origin
gagtggaatggaatcgaatcacatggaactgaatcaaatcgaattgaatgaaattgaatggaaaaaatggaatgaaatggaatcaaatcgaatggattcgaatgacattgaatggaatcgaaaggaatgcagtgaggtggagttgagtggagtggagtggaatggaatgggatgaatggaattgactggagaggagtggaatggaatggaatggaaaggaatggaattgaacgaaatggagtgtagtagaatgtagtggattggagtggagtgcaggggagtgcagtggaatgaagaggagtgtagttgaatggaatggaatggtatggaacgtactggaatggaatggataagaatggaatggaatggaatcgcatggaattgaatagaatgaaatcgaattgaatagaatcaaaaggaaaaaatggaggcaaatggaatcgaatgtcatagaatcgaacggttttgaatgtcagtgaaaggaaacgaatggaatgcgatgaagtggagcggagcggagtggaaaggagtgcaatggaatagggtggaacagaatttaatggaacagagtggattggagtggactggagtggaatggaaagggaaggaatgggattgaaaggagtggcgtgcagtggagtggagtggcatggagtggagtggagtggaatggagtggaatggaatggagtggaatggagtggattggaatggaatggagtgcagaggaatggaatggaatggtatagagtggacaggaatggagtggagtggattggaatggaatggaatgtaagggaatggaactgaatggactggaatggaatggagtagaatggaatcacagggaatcaaattggattgaatcgaatcgaatggagaaaatgaaatcaaatgaaattgaatggaatcgaattgaatgtaaacaatggaatccaatggagtcaaatggaatcgaatcaaatggttttgaatggcatcaaatgaaatggcatggaaggcagtgaattggagtggagtggaatagagaggaatgaattggaatggagtgtagtggaatggagtggattggattggaatggaatggaatagattggattggagtggtgcagagtggagtggactggagtgcagaggaatggagtggagtgaagtccagttgagtggaatggaatggagtggagcagagtggaattcaaaagaatgaagtggattggtatggaatggaatggcgtggaatggcgtggaatagaatggaatggaatcgcatggaatgatatgaaatcaaatcgaattgaacggaaaattatgaatccaatggaatcgaaaggattctaaaggaatggattcgaaaggcattgaatggaatggaaaggaatgcagtgaagtggagtggagtggagtggaatgttttagagtgaactggggtggattggaactctatggcggggagtggagtgaagtggattggagtggaatggagcgcaatggactggagtggagtggaatggattggagtggattggagtgcatcggagtggagtgctgtggagtggactagagtggggtggagtggagtgcattggagtggaatggaacgcagtggggtggaatggaatggaatggaatcaaatcgcatggtaatgaatcagctggaatcaaatcgaatggaaataatggaatcgaagggaaacgaatggaatcgaattgcactgattctactgacttcgaggaaaatgaaatgaaatgcggtgaagtggaatggagggaatgtattagggtggaatggaattgaatggtgtggagtggagtggagtgcccaggagtggaatgggaagaaatggaattgaacggagtggagtggagtggaatgggggataatggagtggagtagagtggagtggagtagagtggaatgggttggagtgtaatgcagagtacaggagtggagtgcggtggactggagtggagtggagttgagtggagtggattggattgaaatagagcggagcagagtggaatggaattgaatcacatggtattgaatcaaatcgaatggaattaaatcgaatcaaaaaatggaatcaaaagcaaacga

SEQ ID NO: 43171 - DNA, 863 bp, Artificial sequence
  DNA replication origin
tattagggtggaatggaattgaatggtgtggagtggagtggagtgcccaggagtggaatgggaagaaatggaattgaacggagtggagtggagtggaatgggggataatggagtggagtagagtggagtggagtagagtggaatgggttggagtgtaatgcagagtacaggagtggagtgcggtggactggagtggagtggagttgagtggagtggattggattgaaatagagcggagcagagtggaatggaattgaatcacatggtattgaatcaaatcgaatggaattaaatcgaatcaaaaaatggaatcaaaagcaaacgaatggagtcaaacctcattggttaaactgacatcgaaaaatatcaaatgaaatgtggtgaagtggagtggagtgtaatgaaatggggtggaatgaaattgaatggagtggagtgtattggagtctactggagtggaatggaacggaatgcaaaggaatggaatagaatgcagtgaagtgcagtgcagtgaagtggagtggaaaggaatggaatggaatggaatggaatggaatggaatggaatggaatggaacggaatcaaatggtatcgaagtgaatcgaatctaatgaaattgatcggaaaaaatggaatggagtagaatcgaataagatggattcaaaggcaacaaatagaattgaatggaatgcggtgaggtggagggcattggaatggagttgaatggaatggggtataattgaattgaatggagtggagtggattgtagtggactggagtggaatggaacggaatgggcaggaatggaattgaaaggggtgaattggaattgagtgctgtggattggagtagactgcattcta

SEQ ID NO: 43172 - DNA, 1031 bp, Artificial sequence
  DNA replication origin
tgagtggaatggagagtaatggagtggagtggactggagcaaagcggagtgtagtgcattggactgtaggggattgaagtggcttggagtgcaatggagtggagtggaatggaatggaatggaatggaatggagtggaatggaatcaaatcacatggaactgaatcaaatcaaattgaatgaaattgaatggaaaaaatggaatcaaatggaatcaaatcgaatggattcgaatgacattgaatggaatcgaaaggaatgcagtgaggtggagttgagtggaatggagtggaatggaatgggatgaatggaattgactggagaggagtggaatggaatggaatggaaagtcatggaattgaaaaaaatggagtgtagtagaatgtagtggattggagtggagtgcaggggagtgcagtggaatgaagtggagtgtagttgaatggaatggaatggtatggaacgtacaggaatggaatggataagaatggaatggaatggaatcgcatggaattgaatagaatcaaatcgaattgaatagaatcaaatggaaaaatggagtcaaatggaatcgaatggcatagaatggaacggttttgaatgtcagtgaatggaaacgaatggaatgcgatgaagtggagcggagtggagtggaaaggagtgcaatggaatagggtggaacagaatttaatggtacagagtggattggagtgtactggagtggaatggaatgggaaggaatgggattgaaaggagtggcgtgcagtggagtggagtggcatggagtggagtggagtggaatggagtggaatggaatggagtggaatggagtggattggaatggaatggagtgcagaggaatggaatggaatggtatagagtggacaggaatggagtggagtggattggaatggaatggaatgtaagggaatggaactgaatggactggaatggaatggaatagaatggaatcgcagggaatcaaattggattgaatcgaatcgaatggaaaaaatgaaatcaaatgaaatt

SEQ ID NO: 43173 - DNA, 965 bp, Artificial sequence
  DNA replication origin
atggaatgcaatggaatgcaatggaatgcaatggaattcagcagaatgcaatggaatagaatgcaatgaaatggaaagttgacatgtaatgtgagcagagattgtgccactgcactccagcctgggtgacacagtgatatcctgtcgaaagaaaggaatggaatgcaatggagtgaagtggaatggaatgaaagggagtggagtggagtggagtggagcagaatggagtggaatgcaatggaatggaatggagtggagtggaatggaatggcatggaatggagtggagtggaatggaatggaatggagaggaatggagtggagtggagtggaatgcaatggaatgtaatgtaatggaagggaatggaatggagtggaatgtggtggagaggagtggaagggagtagaatggaatggagtggaatgaaatggaatggagtggaaaagagtggaatgcaatgcagtggaatgaaatggagtggagtggactggagtaaagtggaatggaatgcagtggaatggaatggagtggagtggagtggaaaggagtggaatggaatgggatggaatggaaaggagtggagtggactggagtggagtggaatggattggagtggagtagagtggagtggaatggaatggaatggtgaaatgaaatgtgagctgagattgtgccactgtgctgcaggcagggtgacagagtgagatacttttgaaagaaaggaatagcgtggaatgcagtggaatcgaatggaatggaatggagtggactagagtggagtggagtgaggtgaagtagagtggactggaatggagaggaatggaatgggatggaatggaatggaatgaagtggagatgagtggggtggagtggattgcagtggaatggagcagaatggaatgggatggagtggaatggagtgcagtggagtgcagtggagaggagaggagtggaatggagtggaa

SEQ ID NO: 43174 - DNA, 1211 bp, Artificial sequence
  DNA replication origin
gaggagtggaatggagtggaatggaatcggatgtaatggaatgtagaggaatggagtggagtggagtcgaacggagtggaatggaatggaaaggaatggaatggaatggaatgcaatggaaaggaatggaatgcaattgaatgtaatggaatagaatgcaatgcaatggaaagttgacatgtaatatgagctgagatagtgccactgcactccagcctgggtgacaccatgatatactgtggaaaagaagctatggaatgcaatggagtgaaatggtatggaatggaatggaatggagttgagtggagtcgagtttagtggaatggagtcgactggagtggaatggagtcgagtggagtgaaatagagaggaatggaatgggatggaatggaatgcaatggaatggtggaaagaaatgtgagctgagattgtgccactgcactccagcctatgtgacagagtgacatcctttggaaaggaaggaacggaatggcatggaatggaagggagtggagtggagaggagtggagtggaatggaatggagtgggatggaatgcaatggaaatgaatggaatggaacagaatggaacggaatggaatggaatggtgaaaagaaatgtgtgctgagattgtgccactgcgctgcaccctgtgtgagagggagatcctgtcgaaagaaaggagtgcaatggaagggattggaattgaatggaatggaataggttggagtggagtggactggaattcagtggattggagtggagtacagtggaatggaatggaatggaatggtgaaatgaaaagtgggctgagattgtgccaatgcactccagcctgggtgacagagtgagatcctgtcaaaagaaaggaatggaatctaatggagtggaatggaatggagtggagtagagtgcattggagaggaaaggagtggaatggaatggaaaggagtggagtggaatggaatggagtggagtggaatggattgcagtggagtggagtggagcggaatggaactgaatggattggaattgaatggaatggtgaaacgaaatgtcagctgagattgtgccactgctctccaggctgggtgatggagtgagatactctcaaaagaaaggaaaggaatggaatgcagtggaatggaatggagtggactggagtggagtggagtggagtggagtgaagtggagtggagtggaatggagag

SEQ ID NO: 43175 - DNA, 3588 bp, Artificial sequence
  DNA replication origin
tgaagtggagtggggtggagtggagtgcagccgaatggagaggaatggaatgggatggagtggaatggagtggagtggagtgcagtggagtggagaggagtggaatagagtggaatggaataggatgtaatggaatgtagaggagtggagtggagtcggagtcggagtgtgatggaatgtaatggaaaggaatggaatgcaattgaatgcaaagaaatggaaagttgacatgtaatgtgacctgagattgtgccactgcactccagcctctgtgacagagtgagatcctttggaaagaaaggaacggaatggtatggaatggagtggagtagagtggagtggaatggaatggaatggaatgcaatggaaagcaatggaatgcaatggaatagaatgcagtgaaaaggaaagttgacatgtaatgtgagcagagattgtgccactgcactccagcctgggtgacacagtgatatcctgtcaaaagaaaggaatggaatgcaatggagtgaaatggaatggaatggagtggagtggagtggagtggaatgcaatggaatggagtggagtggaatggaatggagtggaatggaatggtatggaatggagtggagtggaatggaatggagaggaatggagtggagtggagtggaatgcaatcgaatggaatgtaatggaagggaatggaatggaagggaatggaatggagtggaatggaatgaaatggaatggagtggagtggagaggagtggaatggaatggaatagagtggaatggagtggaaaagagtggaatggaatgtggtggaatgaaatggagtggagtggactggagtagagtggaatggaatgcagtggaatggaatggagtgtaatggaatggaatggaatggaacggaatggaatggaatgaaatggtgaaaagaaatgtgtgctgagattgtgtcactgcactaaacctgtgtgacagagggagatcctgtcgaaagaaaggagtgaaatggaagggattggaatggaatggattggagtggagtggagtcgaattgagtggagtggagtgctgtggaatagaatggaatggaatggaatggtgaagtgaaatgtgagatgagactgtaccactgcacaccagcctgggtgacagagtgagatcctgtcaaaagaaaggaatggaatggagtggagtggagtggaaaggagtggaatggaatgggatggaatggaaaggagtggagtggactggaatggcgtggagtggaatggagtggaatggattggagtggagtggagtggagtgggatggaatggaatggaatggtgaaatgaaatgtgagctgagattgtgccactgcgctccaggctgggtgacagagtgagatactttcaaaagaaaggaatagaatggaatgcagtggaatggaatggcatggaatggagtggagtggggtgaagtggagtggactggaatggagaggaatggaataggatggaatggaatggaatgaagtggagatgagtggggtggagtggattgcagtggaatggagtggaatgggatggagtggaatggagtgaagtgcagtggagaggagaggagtggaatggagtggaatggaatcggatgtaaaggaatttagtggagtggagtggagtggaacggagggttatggaatggaattgaatggaatggaatggtgaaatgaaatgtgatctaagattgtgccactgaactccagtctggttgatagagtgagatccagtagaaataaaggaatggagtggagtggagtggaatggagtagagtggaatggagtggagtggaatggaatggcatggaatggagtggaatggaatggagtggagtggaatggagtggagtggaatggaatggaaaggagtggagtggaatggaatggcatggaagggagtggagtggagagaagtagagtggaatggaatggagtggagtggagtgcaatggagtggaatggagtggagtcgaatggaatgggatggagtggaatggaatggagtggagtggagtgaaatatagtggaatagaatgggatggaatggaacgcaatggaatggtgaaaataaatgtgagctgagattgtgatactgcactccagcctttgtgacagagtgagatcctgtggaaagaaaggaatggaatggaagggaatgcaatggaggggaggggagtggaatggagtggaatggagtggagtggaggggagtggaattgagttgagtggagtggaatagagtggaatggaatggagtggagtggactggcatggagtggaatggagtggagtggattggagtggaatggagaggagtggagtagagtggaatggaatggagtggattggcatggagtggcatggagtggaatggagtggagtggagtggaatggagaggactggagtggagtggaagggaatggaatggaatagagtggaatggaatggaatgaaatggtgaaaagaaatgtgtgctgagattgtgccactgtgctacagcctgtgtgacacagggagatccttttgaaggaaaggagtggaatttaagggattggaatggaatggaatggagtggactggagtggaatggaattgagtggagtggagtggagtgcggtggaatggaatggaatggagtggaatggtgaaatgaaatgtgagctgagattgtgccactgcacaccagcctgggtgacagagtgagaccctgtcaaaacaaaggaatggaatggagtggaatggaatggagtggagtggaaaggagtggaatggaatggactggaatggagtggagtggaatggaatgggatggaatagaatggaatggaatggtgaaatgaaatgtgtgctgagattgtgccactacactccaggctgggtgacagagtgagatactctcgaaagaaaggaatggaatggaatggaatgcagtgtaatgtaatgtaatggaatagaacggaatggagtgaactggagaggagtggagtgaagaggagtggcgtggaatggagaggaatggaatagaatgaagtggagtggagtggggtggagtggagtgcagtggaatggaacggaatggaatgggatggagtggaatggagtggagtgcagtggagtgcagaggagtggaatggagtggaatggaatcggatgtaatggaatgtagaggaatggagtggagtggagtcgaacggagtggaatggaatggaaaggaatggaatggaatggaatgcaatggaaaggaatggaatgcaattgaatgtaatggaatagaatgcaatgcaatggaaagttgacatgtaatatgagctgagatagtgccactgcactccagcctgggtgacaccatgatatactgtggaaaagaagctatggaatgcaatggagtgaaatggtatggaatggaatggaatggagttgagtggagtcgagtttagtggaatggagtcgactggagtggaatggagtcgagtggagtgaaatagagaggaatggaatgggatggaatggaatgcaatggaatggtggaaagaaatgtgagctgagattgtgccact

SEQ ID NO: 43176 - DNA, 1938 bp, Artificial sequence
  DNA replication origin
aaagaaaggaatggaattgaatgcagtggaatggaatggaatggattggagtggagtggagtgaagtggattggagtgcaatcaagaggaatggaaaaaggtggaatggaatggaatgaaggaagaggagtggagaggggtggagtggagtgcagtgggatggagcggaatggaacgggatggagtggaatggagtggagtggagtgcactggagtggagaggactggaatggagtgtaatggaatcggatgtaatggaatgtagtgcagtggaggggagtggagtggaacagagtggaatggaagagaattgaatggaatggaacagaatggaaaggaatggaatggaatggaatgcaatggaatagaatgcaacgcaatggaaagatgacatgtaatgtgagctgagattgtgccactgcactccagccagggtgacacagagatatcctgtcgaaggaaaggaatggaaagcaatggagtggagtggagtggaatggaatggcatggagtggaacggagtggagtggagtggagtgaaatacagtggaatggaatgggatggaatggaatgcaatggaatggtgaaaagaaatgtcagctgagattgtgccactgcactccagcctttgtgaccgagtgagatcctgtggaaagaaaggaatggaacggaatggaatggagtgcaatggaatgcagtggagtggagtggaattgagtggagtggaattgagtggagtggagtagagtggaatggaatggagtggagtggaatggagtggcacggattggaatggagtgggagtggactggagtggaaatggagaggagtggagtggagtcgaagggaatggaatggaatgcagtggaatggaatggaatgaaatggtgaaaagaaatgtgtgacacagggagatcctgtcaaaagaaaggagtggaatggaagggattggaatggaatggaatggattggagtagagtggagtggaattgagtggagtggagtgcagtggaatggaatggaatggagtggaatgatgaaatgatatgtgagctgagattgtgccactgcacaccagcctgagtgacagagtgggatcctgtcaaaagaaaggaatgtaatggaatggagtggaatggaatggattggagtggagggaagtggagtggaaaggagtggaatgcaatgggatggaatgggaaggactggaatggactggaaaggagtggagtggagtggaatgtactggagtggagtggagtggaatgtactggagtggagtggagtggaatagaatggaatagaatggaattgaatggggaaatataatgtgagctgagattgtgccactacgctccaggctgggtgacagagtgagatactcttgaaagaaaggaatggaatggaatgcagtgtaatggaatggagtggactgcagaggagtggagtggagtgaagtggagtggagtggaatggagatgaatggaatgagatggaatggaatgcaatgaagtggagtggggtggagtggagtgcagccgaatggagaggaatggaatgggatggagtggaatggagtggagtggagtgcagtggagtggagaggagtggaatagagtggaatggaataggatgtaatggaatgtagaggagtggagtggagtcggagtcggagtgtgatggaatgtaatggaaaggaatggaatgcaattgaatgcaaagaaatggaaagttgacatgtaatgtgacctgagattgtgccactgcactccagcctctgtgacagagtgagatcctttggaaagaaaggaacggaatggtatggaatggagtggagtagagtggagtggaatggaatggaatggaatgcaatggaaagcaatggaatgcaatggaatagaatgcagtgaaaaggaaagttgacatgtaatgtgagc

SEQ ID NO: 43177 - DNA, 822 bp, Artificial sequence
  DNA replication origin
atcacctgggtgatcagtgcagagatatgtcacaaagctcctgtaggcagagcctagacaagggttacatcacttggttgatcagttcagagatgtgtcacaatgcccatgtaggcagagcctaggcaagagctacaacatctgagtgatcaatgcagtgatatgtcactatgccccaataggcagagcatagtcaagtgttacatcacttgggtgatcagtgcagagataggtcaaaatgcccccatacacagagactataaaatagtctcatcacctgcactacagcctgtgtgacagagggagaccctgtcgaaagaaaggagtggaatggaagggattgaaatggaatggaacggattggagtagagtggagtggaattgagtggagtgcagtgcagtggaatggaatggaatggaatggtgaaatgaaatgtgagctgagattgtgccactgcacaccagcctgggtgacagagtgagatacagtcaaaagaaagtactggaatggaatggagtggaatggaatgtaatggagttgagagcagtggagtggagtagaaaggagtggaatggaatgggatggaatggaaaggactggagtggactggaatggagtggagtggagtggaatggattggagtggagtggagtggaatttaatggagtagaatgcaatggaatggtgaaatgaaatgtgagctgagattgtgccactgcactccaggcttggtgacagagtgagatactctctaaagaaaggaatggaattgaatgcagtggaatggaatggaatggattggagtggagtggagtgaagtg

SEQ ID NO: 43178 - DNA, 22 bp, Artificial Sequence
  oligo F
cacatggaggttctatgactgc

SEQ ID NO: 43179 - DNA, 20 bp, Artificial Sequence
  oligo R
caagttcacgcccaagtaca

SEQ ID NO: 43180 - DNA, 19 bp, Artificial Sequence
  oligo F
gtccaccccttccttcctc

SEQ ID NO: 43181 - DNA, 22 bp, Artificial Sequence
  oligo R
tggaggaggtgagacttaagga

SEQ ID NO: 43182 - DNA, 18 bp, Artificial Sequence
  oligo F
gagttccgcggtgctgtc

SEQ ID NO: 43183 - DNA, 20 bp, Artificial Sequence
  oligo R
aaccaacatcgagagggacg

SEQ ID NO: 43184 - DNA, 20 bp, Artificial Sequence
  oligo F
tgggaggttccagcagtatc

SEQ ID NO: 43185 - DNA, 20 bp, Artificial Sequence
  oligo R
cctcttttggtcctggagtg

SEQ ID NO: 43186 - DNA, 20 bp, Artificial Sequence
  oligo F
gaactcggagcagagactcc

SEQ ID NO: 43187 - DNA, 22 bp, Artificial Sequence
  oligo R
gatgatctccctctccttttcc

SEQ ID NO: 43188 - DNA, 19 bp, Artificial Sequence
  oligo F
acggaggggtcaccagtag

SEQ ID NO: 43189 - DNA, 20 bp, Artificial Sequence
  oligo R
cccaacccactgtttctagg

SEQ ID NO: 43190 - DNA, 20 bp, Artificial Sequence
  oligo F
gattgaaaagtctccggggc

SEQ ID NO: 43191 - DNA, 19 bp, Artificial Sequence
  oligo R
cgaactgccagaacgtgtg

SEQ ID NO: 43192 - DNA, 19 bp, Artificial Sequence
  oligo F
gggctgactttctccctcg

SEQ ID NO: 43193 - DNA, 18 bp, Artificial Sequence
  oligo R
actccactcccgcccatc

SEQ ID NO: 43194 - DNA, 20 bp, Artificial Sequence
  oligo F
gaaggcagatcacgaggtca

SEQ ID NO: 43195 - DNA, 20 bp, Artificial Sequence
  oligo R
tcaagcgattctcctgtccc

SEQ ID NO: 43196 - DNA, 20 bp, Artificial Sequence
  oligo F
ggcaggatttaggaactgga

SEQ ID NO: 43197 - DNA, 24 bp, Artificial Sequence
  oligo R
tcaggattctttagaaagcagaat

SEQ ID NO: 43198 - DNA, 20 bp, Artificial Sequence
  oligo F
agggaaatgaaacagggaca

SEQ ID NO: 43199 - DNA, 23 bp, Artificial Sequence
  oligo R
gggtcagaaataaatccccatag

SEQ ID NO: 43200 - DNA, 20 bp, Artificial Sequence
  oligo F
ccagtgtgggtgacagagtg

SEQ ID NO: 43201 - DNA, 20 bp, Artificial Sequence
  oligo R
ggacagtgtgaccgaggagt

SEQ ID NO: 43202 - DNA, 20 bp, Artificial Sequence
  oligo F
tctcacagcttgtgcagtcc

SEQ ID NO: 43203 - DNA, 20 bp, Artificial Sequence
  oligo R
gctgtttccccacaaaacac

SEQ ID NO: 43204 - DNA, 20 bp, Artificial Sequence
  oligo F
agccacgttagggaaaggtc

SEQ ID NO: 43205 - DNA, 21 bp, Artificial Sequence
  oligo R
caaatgtgtttcttgggttgg

SEQ ID NO: 43206 - DNA, 20 bp, Artificial Sequence
  oligo F
gctggagtggagacagtgaa

SEQ ID NO: 43207 - DNA, 19 bp, Artificial Sequence
  oligo R
ctcaaacccaaacccaatc

SEQ ID NO: 43208 - DNA, 20 bp, Artificial Sequence
  oligo F
tcttgctttctccttgctga

SEQ ID NO: 43209 - DNA, 19 bp, Artificial Sequence
  oligo R
caggggaggtgaacagatg

SEQ ID NO: 43210 - DNA, 19 bp, Artificial Sequence
  oligo F
caagaatcggacgtgaagg

SEQ ID NO: 43211 - DNA, 21 bp, Artificial Sequence
  oligo R
atcattccaggaatcctctgg

SEQ ID NO: 43212 - DNA, 22 bp, Artificial Sequence
  oligo F
agggctgagccataattcttct

SEQ ID NO: 43213 - DNA, 21 bp, Artificial Sequence
  oligo R
ctgcaatgcactcacaacaac

SEQ ID NO: 43214 - DNA, 20 bp, Artificial Sequence
  oligo F
cttgcacaatgcctcactca

SEQ ID NO: 43215 - DNA, 20 bp, Artificial Sequence
  oligo R
gaaaacaccagccaccagaa

SEQ ID NO: 43216 - DNA, 20 bp, Artificial Sequence
  oligo F
gctactgattcggtgagcag

SEQ ID NO: 43217 - DNA, 21 bp, Artificial Sequence
  oligo R
gagttaaagcacccctgttgg

SEQ ID NO: 43218 - DNA, 23 bp, Artificial Sequence
  oligo F
accaagacccctttaactcaaga

SEQ ID NO: 43219 - DNA, 21 bp, Artificial Sequence
  oligo R
cctcgtcgcagtagaaatacg

SEQ ID NO: 43220 - DNA, 1103 bp, Artificial sequence
  human replication origin
cttgcctgctgcagggggcagggcacagaagggaaactgcttgccctggggagtgggggacagcaggatgggagttgggggtggagggatgggagttggggggcggcaggatgggagttgggggtggcgggatgggaatgggggggcggcgggatgggagtggggggtggtgggatgggggtggggggaggcaggatggcccctctacctgttggcactttcctgctggaggctgtgggagtctgcagggcctctctacctggcccaggcaggaaggaggaaaacatcctggatgtgatggccactgtggcccaccatgcctggaccacttcggggagtggctgcttctctccactcactaatgtctgcttcccccgagcctggggcctctgccccctccctccctccatgcccatgtttctgtctgaccttggcgctggtagctctgtgacctcggctgggaaagtctgtctctgggctctgcctcctcctccccactcagtctctccaggattgacaaggccctgctccccggggacactgggagggctccctggcttgggtgtgtggccctgaagaggaaggaggattctgtggtgccactgtggacccccttgactgagtccctgccctccccagccctgcccggatgtctattggttccccatcttcacggaggtggcctgtgatgagctggtggaggagatggagcactttggccagtggtctctgggcaacaacaaggtgggaccctgatgcctgggctggggccgcagggaggctgcctctccatcagtgccgctcactgtctggggtcttctggcaagctggcctggccaccctttctgggactcttgacataggggtgctggcatgggtatctgcaggcaggtaggagtagagggattgagaaacctgagatggagtttggtccctgagctgctgttgccaccgtgtggctttgagttgccttgaccgtaagctactaggttttcagttcctggtttgctattggaatggcttagcttggttccctagacttcccccaggtggagctggggaggaaagggccaaggtgggatgaggggcattaggaagggctg

SEQ ID NO: 43221 - DNA, 1150 bp, Artificial sequence
  human replication origin
cgggagaaggggcgggggcgacgcgcgccgcctcctgttaaagggggaacagcgccagccgagccgatcgtgccccccacctccccgccttgggccccaggcgccggcgcgggagaagccctgggtaagcccccgcccagcccgctgcttcttggaccgcagaatgaggcgatccgcgacgcccctccagctatacccatgccggaggcttgtcgcgccgccagggtgtcccgggccctgcaggctgaagcatttgctcaccttcccatgtgcattgcatattgcatgtccctgtgcatgcaggtgccagtcatgtgcgctgaactttgcatatgcatacaggtgccctaagtgtgcactgccatgttgcctgggtaggtgcatgcaagtgccacacacatgcacggtgtattaacatgtgcccaagtcctgaatgcatgttgcttgttcctgtgcgcagggatgttatatgtatgcaagcttacaggtgccacatgtgtgctgaggactgtgggtaactcatgtagcagccacatatgtatactgcaatgtgacatgtttgatgcatactgtaaactgcaatgttgcacgtccttaggcacggggatgctacacgtgtgcagtgtgttacatgttttcctgagtccctgtctattcccacaagtgcctttccctgtgccaggggcgcccccatgttgcatctgtttgtgtagaagcagcagagatgtacagacccaccccttccccatcttggcactaagcccagaaacagttgggtggggcctgagccctcatggttcaggcggtacacagggagatgcccatggttcagggctctggtcaggcagtttgtggcctgggcatgttgccatcagtaaggtaggccgaccagggacgcaccattgcagccaacacaagtaggttaatcccatggctttggtcagaggagaaaccagcagggggcagctttgcaataagggtgggatggtttcagctttgcgatgagggtgggatggtttcaggaccatactttttgaaggttcactagccaggaagggccaaattttcagtgcaaagaagtcctcatttcagcaaataccaaccccacctctccactgatgccccttaagttgtggcaccctcaagatgg

SEQ ID NO: 43222 - DNA, 1150 bp, Artificial sequence
  human replication origin
cctaggtggggaggcacgggtgctgggtggactctaacccccaaacagacttgtttggggatgagggagtgtgcagataggggcccctgggtgtgtttgtgcctgtagtccttctaggcccgtttgctcagggctctgactgaccaccatgcccgaattgtctgacagcatctacttacctggttgtacagtcgggcaccatcatctccgtccttgtgaggcctggagcctaggcagtggtctctgcctccagtgatggtcctgtccttctagcagcagcccctcccagaaacctctactctgatccttgttcccagggcccagggcagctcctcccaccccatccaatctcgttttctccttccctgaccctgtttcctgttaccccagaagccccagccacctccagcccacgcctttaagggtcctgccccctctctgctggccgaccttgaatcttggtccaattaaagagttgacaaatccctagccccgcagcctgagtccgcccaacctccaggtccccttcctggggagttcgcgctccaatgcaatccccactccccgctaagggactccacggtctgcacccgctcgccggtccgacctctaagcccaccctttggacgagcctgacccatttcctcccgcgctcccaggtccgtgcctcctgggtgcccgggttcggccgccggcagggcgggctcgcagcggcgcgcggcgggtgcgggcgtgctggaggcgggggccgcgggggcgcgcgcgcgggcgcgcgggccgggcctgcccctccgaggcgccgtagcgcgggagggaggcggcggcgctgtggtccgtgggtccgccggtccgtgggtctgcccggccgcccggccccgccctgccccccggggcggctcggctccatggcccgcggcggcggcggcggcggcggcggcgggaggcgacccgggggccgcggtggccgctgaccgggcggcgggaggcggcggggccgggccatgggggacggaaccgtccgcagccgccggagccgggagccctgcccaagtcggagcggcgtcccctgctgagccccgagcgccgggtgagaggagggcgcgcgcggcccccacccagggccccgagattccagacccagccccgcgag

SEQ ID NO: 43223 - DNA, 1150 bp, Artificial sequence
  human replication origin
gggaggagcctcggaaggcggcgcaccgcgccgcacactcagtccaagaacccgcctcgcgtcactgtcgccgtcagggccgcggagccaatcagagcccaagtcgagggctgcgctttgcgagcgccagccaatcggtgcggcggcgggcccatcctgatttgcatgtccgacgacccctcaaccaatggtaatgtgactggcgtgaacaatagccaatcagaagctggaagaggcgtggccccgggcgtcccacgaggtgaagatgctgctggcggaacctgcaggagctagcgggattcgggggcgctaaagtcgcaggggcagggcgggaaggaagatccggcgcggggcacaggatccggagctggagcccccaggtgagtaccggggagaccccggcggggcgcgctttccaccaagctgctccgggacggcggcggcgggtatccgcgaggcccgcgctgcggcaggcgccgcggtcccgtctccatctcttcttccccggccctgcgtccctgcctccgccgctgtctcacctcctctccagcctcctcacctccttctccatcgtctcccttcccccatccctttctgtctttccttccctgtcctcccgcccgcccgacccttcagctcgcatccctgacccctgcccctgccgccgtccctcttcccggtgcacctcttccccatctctgcccgctccggtcctagcagcctcgccctcccctttcctccatcctcctctcatcccctctcccggcctctgcgcagccccaccggggcgctgctgttcccggtcctccccatctctcctcctgatcgcttctcaaggctcatccgtcgttctcgctgcctgtccctgtgtcgctccggtccctttccccaccctcccattctgcccccagcccctccgacctctccccgcgggcacgctctcaccaccttaccctgctccccaagactgtgaccctgcttcctgcaccagttcctcgggctgtttacagcacacacaccgccacttctgaccctgagcccctactcctatcttaagcttctccctcctgccaggccttggcacaaagcacttccgcacctccctacctgctgctgctcccaggatgcaaagaccccactgctgcaccgc

SEQ ID NO: 43224 - DNA, 1000 bp, Artificial sequence
  human replication origin
acagctgattctgtttttccttcccagccaatggtgatcaaaagcttcaggacgctggtgagtcactgcggaggagccgaacactgaccgcgccgtccccgccaggctcccgcgcggccggcaccgcggccctgagcgcaggcggccccgggtctcaggcctcaggcggaccgcgccccgggctcgcagccctcccgccccggctgccgggctacggggcagatggactcggagcgccccgccggtgagtagctacgacccccgaggccacctcccgcgaaccgctcggcggcaggagtacgtgaccaagggtgggggcgttggcccagcagccgaaggggtcttcagcgcgcccagacccctcggggctgcggggcggaagccggggcgtgacttccggcgccgccgggtgtggggcggaggtgtggggcggcttccggagaacccagcggcgcgggactggggcgggacttccggcgacaccggaagtgcattagcgccaggttggggttgtggggtcgcgtcagtgcggagacagcggtgtcctgcgcgtcttcgggtcagtacggggggccgcgtcgtagggactcactggcggtgcgcgacctgggctggctccgggggtggcgggcgcagctgctgtgacaggtgagtgccgccatcttcctacctgtcaggcgccgagtcgttccccggatgccccgaagaggagtcgggacactgcagggctcaagggggtgcaggggcagtcggggcatagtggcggatggggtgcaggtgggcttggaatgcagagggtccgtggtggtgcaggaggggtcgggtccctggaggacccgtggcggtgcaggaagggccgtggtgcagaagggttcagggtgcaagagaagtcggggcgcaggagtagtccgtggcggtgccagagggaccagggtgcgggagggatgggggcccggggcggtgcagaagatgtcggagtccaggaagagtcggggcgctg

SEQ ID NO: 43225 - DNA, 780 bp, Artificial sequence
  human replication origin
tgaccaggaactttgaccagccccttcacttccccaagctctctgaaagtggagggttgatctttccttttgaccacttttgtcgcatcccgtctaagggtggctgatttcactgctgaattaaccaccaagcacccccccaccccctcccccagccaccactttctcaaatactacccttccttttccccctcccttaagacttatttctaatatttctaaagtgcactgttttgggcctctccccatccccgccccccaagtgggctttccttccgccttcctcggctcggattcctgacttggtcgccacccccttctcctcctctcccaccccgcattgtctttctgaaaccgccccctcccggagcaagtccctgcaccctcgcccagaatcccgggctcgcacacactccgcgcaggccgctccccctgcacactcctccctccgtctccccccggcttccccgcccctctcttcctccttctttccctcctccctctcccggcgcccgaaaggatcattgttagccgcccccgccccgcccaccccggctgtttatttatgcacacgtcactgggccggccccgccctccggcatctcattaaggcagtgtgttcctctcgccctgtcaataatctccgctcccagactactccgttcctccggatttcgatccccctttttctatctgtcaatcagcgccgcctttgaactgaaaagctctcagtctaacttcaactcactcaaatccgagcggcacgagcacctcctgtat

SEQ ID NO: 43226 - DNA, 1272 bp, Artificial sequence
  human replication origin
ttggggagctgccagccccgggcgcagggacgaggacccctacgcctccggcctgccctggaccctcccctcccgggtaccagcgcgccgagcgcctcccgtcgcagcgtctcacccgccgctcagccgcctcagcacacacaggccctgccgcccgccgcagcgccacattgcgcatgacgagcacctggctggcgaggaaccccctcttaacccgacgcagggcgcggggcggggcttgccgtgacagctaccactcctattggtcaacgcgaacagcgacgtcctctgcgataggctgtaggtgaaaagggtaggcctccactgctctgggacgggcgggagggcggtgcggacggagatgggcgggaggggcggggccgacgtgccgaaggaggcgggcaaggcgaggggcgtggtacgggtagaaaggggcggggccgtcttgccgaaaggggcggggttcggccagcagcaggatgtggacagatgataggagggggaagtgggcaggcgagaagtggggcgtggcgagaggcgtgtgtatgcagatgaagtggggcctggtgaagggcggggctgcgctggtgaaaagaggggctcctggaatggcgtgctgtgttgggtggggctgtgcaagtgatgggaggggcttagcgaggggtggctctttgcaggtgaggagtggagaccagtgggagaggggattgcaagtgagctgagccttgggggcggggcttgcaggtgacagggtggagcctagtgggcggggatgcaagtgagctgggccttggggatggggcttgcaggcgatggggtggagcctggtggggcggggctgcaggtgagctgggccttgggggcggggcttgcatgcgagaggtgggtccttgtgggggcagggctggcagaagtgggtggggcttggtgatggaccgcggtgttcaggtgagggtagtggcctggttgggggctgccggaagctgggccaggtgaaacttggtagccctctctggccttggtgtgggcgttggtcctgtttgtagggctgagctgagctccaaaggcgttctgctgccccgccaggcctgaaccttggggtctgggggcttcttggatgagatctcaaggctgcatggcaggtcccagggccagggccccacggtgtcacacgtatcacggatggccgccagcgaagcacagcacagctccgagctgctgcatgggagcctgtggcccccgctgctgcctccgctttcctcttcgtttcgt

SEQ ID NO: 43227 - DNA, 800 bp, Artificial sequence
  human replication origin
gcttcccactcttactttgaatcacttttttcctcttcattgctataatgacaccaaggaatggaagacacttgtgtaggtcttccccgtcccatccacttcctccccatcactttcctccagtgttgaaacatgactggtctaaactactctttaggaaaaacaaacaaaagcaaccactcttggccagtccctagacactgggtctttcccaccacccctgactcctcccacaagccttggtccctcccactagccatgaatcctcccaccatcctcggcccttcccaccacccctggcccttcccaccatcctcggcccttcctaccagccccgtctcctccaccagcctcagcccctcccaccacccgtggctctgcccaccatccttgtcccctcccaccagccccagaccctcccaccaaccctagctcctcccactacccctggctcctcccaggatcctctgcccctcccaccagccctgggccctcccaccaccctcagcccctcccaccaccctcagcccctcccaccaccctcagcccctcccaccagccctggtccctgtgtgccagcacaactcactttgctgctggtgagcacggtccccttcaggacctctaacctggtctttggaccctgcttctcggaaccatggcccttacaaggtggaggtagagacctccccttcctcgacagtcccccaccttttgatcgccacctcgaaaggaagtagaggtctagctgctcaaaggtttgggaggctgggaggcggtgaaatgcctgcagcatgcag

SEQ ID NO: 43228 - DNA, 850 bp, Artificial sequence
  human replication origin
gcagcggccggtttgcttctaaaccgagccctccaatacagcatgtccctgccgccccctatagggccgcctcgtaccctataacctccaccatcatccccctaagtccttgccgcccccttcggcctcatattccctcatcttcgataaagctactccgagtacttagcctgttcctcctgccgaccctgctgcgcaccacattcctatattcgcctcctctcaggcgctcccaccccacacagctgccgaccgccttcctccccaggcccggccaggccttaggcctccgcccgagagtcccccagagccggcccggggggctccccacagcccccaaagcaccgctgacctcgaccccaccacctcaccccaagcctcgcgactcgggcccgtgtcctaccaacgaggccactcccgctcggcaccctcggtcctttattgttgactcgaagctcccaaaatggcggacgctccttcctcctcggaaacctccgcccgcccccacccagccctctcgctacggcctcctctcgcccccgcccccgccccgctccgaggggcgcgcaggccagccgcccgagccgccggctcccccggctgtccagccctacctcctccgctgcccgctctcgtggcgccgccgaagtcgccgcctggctgagctaactcggctcctctgccccctccctcgctcgcccgttcgcccgcccgccgcctcctccctctttccctgcctctccgcatggcggcgaccgcggctcctcctccactcaagatggcgaaacctcggccgccgcggctatattcgccgcggcgtcactgccttcctggcctggtggtgagagga

SEQ ID NO: 43229 - DNA, 1250 bp, Artificial sequence
  human replication origin
caagcaaagcgttgacccggctacccctgagcagcgccctacgctgggttccactccacttcccctcccccgcgcggggcgatagccaggcgcggtcccttcccacgcgggccgcggcgagtgcggacagctcccttccgggctgcggaaggcgggaagtctgcggttcgcgggctccggctggcgggcgcccctcggagtccctgaagtcggccgggccccgcaggacccgcgccttctcggccccaactgtccctcgcgaagcgtcctgcggtggcggaggcctcgcggccgcccgccagccccgcgagcggcaagcgcggggctcagaggggaggcggggcaaggccgcggggcggaggggggcgggaggtgcatcctgggaaatccaccaacatggggcgcagcggccgccgccgccgccgccgtcgccgcgagtcccggccgcgggtgcctccgcttccctgacgcccagctggggcctcgccgcccgccgcggcccgggtctttgcggcccagactcgccagcgcgcccttctcccgcctgctcgccggggccatgtgagggggcagctccctccaccgccgccgccccctcttcctcccccgccccctctccctgcccgcccccgtcacacggagccctggaggatcccccgctgctgcccgccctccctacgccacccccacgatggacaggaactacgcgacctcgggcttcaccgagccgccgccgccgccgccgcccgcgccccccgccgcccccgtccccgccagcgccgctgcgcagccccccgccccagcctgggcgtacgaaccccgagccgccgccgccgccgccagcagcagctgcagcagtggcagctgcagtagcggcagcagccccagcctcaaggccaggtagggagggtgggcggcggggtcgcggtggaccaggaaaggccggggatgcgtttggggccttcgctcggttgcagcgccgcccagaggtctgggccgggcggggagccctccgctcgccctcggccagctcgggggaggcggctgatgactcctacggggtggtcgcgggtaggtgggggcgcccggtgcaggattcgcgcctggggacggcgggtgaaggaatagctgggcgggagtcgtggggctccgtcacctcttgggtcctgggctctcacatggtgaagtttgggctcgtggctgaactcgggatctgtgagacccaggattggcgccgggggtccgaaggg

SEQ ID NO: 43230 - DNA, 1000 bp, Artificial sequence
  human replication origin
ccgtcacatggcggtgggcgcgggcggagacgcgcgggggcggggcgcaggggaaacggagggggggtgcggacgggataaaaacggtggggggcagctgagggaaaagatggaaaatcggggaggcggtacgctgacgggataaaagctgaggggttgctcaggggaaacgggggcggggaagacgcgcgaaccagataaaaatggggcaggggtggggggagctgagcggaaacggggtggggcgcgaacgggataaaacccaggggttgtgcggggtcctgaggggaaccagcgccggataaaaacggggaagggagggaggtgaacagagctgagggaaaccgggaaaaggggagcgatagaaaccggagtaggggaagccgggctcaggggaaaagggggtgttggagagtggtagagccgggctgagagaaaaaccaagcaggggaagcggcgatccggggagaacggagagagggagaccgagggctgtgggggtaaggggaaccaaaggggctgaagcgaaatcgaggggaggggcaggtgaaaatggagccatgcgaaggccgatgaggggggaaacgggtaaaaatgggggcgggagaaataggttggagggaatactggccgagaagaaacctggggagagctgggcttaggggaaaatggggagggggtggaaggaaggtgtaataaccgggtgctggggaggacgtaagaattggggggtgcggcgagggtcaaggctagggtaaaacaaggggggctactcaatggctccggtaatgggagagggaagtgaggagaacacggggcggtggggagaggagggcagggtgaaaaccggagtgggggtgggaacgagataaaaaacggggcaggagcgattcggaagaagactgtccccttacctacctacggcgacagcctcgcctgtccccgtccccctgagaaacctgctctccctgtctacccgcatagcctcaagaaatggctc

SEQ ID NO: 43231 - DNA, 1209 bp, Artificial sequence
  human replication origin
ctccaagtttccgccctcagttaattcggcgtttaattggcttttagttcacgtcaatatgcgtcctttcctgtctcttttcagtctaactccaatcataacgttcctggctgcccgcctgatttctgattggttttaatcagcttcatcctctcctattcctgcctacttcttacctctccgcccactaggattttgcccaagcatatcccggattctggttggccgttgttctgtcattcctatcaaagctttgcctatccctacgtctcagggagcccgcctgccggttgactggtttccttccaagccaatcatctccagctcccgcccatcttcacttcctgcatccttcattggcttttaacactgagagggcggtctttttaggcggacaccaggcacgcaacttagtctcacacgccttggagagcaagcgagtcttgccattggataattccaccgtctttcttctgcaagtccctcctttccccctccctcattgggcggggcagcagagaaggggcggggcctaggttgggcttgtggcgcgctgctccctcctccttacccccccctccctgtccggtccgggttcgcttgcctcgtcagcgtccgcgtttttcccggccccccccaacccccccggacaggacccccttgagcttgtccctcagctgccaccatgagcggtaaggatgagtccactccaagcttaggggtgggaggcgagtgagggggcgcgcgcgagggccgaccgggcgatccccgccgtgaagcgggggcgggcgggaggcggcggcggcggcggcctaggtcccgcccggggcggagggaagggagggagacggggcagtggcggggcctccgaggaggagggggatgggccgcccgccccgggggagggggcagcgtggcctcgcccgccccctgcccgccccggccacgggggacgggccttaccccccactactcggccgcccgcctgaggctcctcccgccgggggctggagccgcgggggcggcccgagcagcgaaggccccgcccgggccaaccgcctgcctggtccgccctctggtcgccgcctgctccaaggccctcctccccccactttccgtagatttcccttcccccccgccccccaccgtcccgccctttccacgcccctcaccccgaaaccgccctttccctcagggcccgccctccgc

SEQ ID NO: 43232 - DNA, 800 bp, Artificial sequence
  human replication origin
tttctctctccttatgaccccaaacttccatcccattctctctgataatagcccccaaacccgtctggctccatctctgccacagatccctcaccccaagcttctctcacttctcaccaggcacccacaaagcccccaggcagctccatctttccaatccaatcccattatcccaatctctaccccaggatcccccaaactcctcccacttcacctctgccacagacccgctcgcccccaaacttcagcctcccctcatctgccctcaccacccacagcccctcctacctagccctctcccgcgccgggcccgcgggctccccacattccgccacggctagccctccccgcgccccggccccctcggcctcggcctcggccaactcgcgctgcgcctccccctctccggctccccctctctcccccctcgcggcttgcctcgcgctccctccctcgcgtctccctcctggcccctctctcctccgttcctccgcgctccctccttctccctcttcctcccttctcccatccccctctcccaggctccctcccttcgccgtccgctttcctgtgcgagtcgccggacgcaccgcccagcccgtccgcagccccgcgccgggtcggggcctcgggccgggccatttcggagggaccgcggcttcggggaggggctaggaggggggagagggagccgactgccggggaaggggcgggggccgcgggcgaggcggccgaggggcccgggatcgcgcgggtgcgggctgcgctaggcgggcgcgggcggcggcgggtcggaaccg

SEQ ID NO: 43233 - DNA, 1200 bp, Artificial sequence
  human replication origin
tgcccatcatttaggcagaatgccacggaggcgacgtgaaaagtggaattcatcattctggcttgcaacgcatcttgttcttttgccagaacagggcacagcaactggctcctcaatctctgcccctcccaaaccccagcagccggtccctgtctccatcccgccggcctcggtggcaaggggctcgcgagctctggttggcttggccgaagcttccgtcactcgccagctcacctacgattggttggcagagcgtgcgcgaagagccccgcctggcaaggcactgggaggtgggcttgcggatcctacgactagcgtttttctcgattggttgaaggagtaaaggcacgtggtatgggggcgctctcttattggtcgtgaatggtaccttgtggtacagagacgtgatgtggttggctagaatgaatcccagcttcccactagatgcccctagctggctgttgctatgaggagtccagggccttccggctgccgttcgggattccgctctccaggttttcaactcacccgtggctgacagggcgtgggaagagctcgacttcagttcggcaccgaaaggggcgggtctagaagaaatgtgggcgggtccagagggttggtgggcgggaccccggcgacgtcagcgggcttggacccgacttccgtggtgtgtggccgcctctgactcgcccctctggcgcgctgctagaggggggcgtcaccctcccatcaatgtcctaacgctccaaagcttcattttgttgcgtttacacaacttcagtcagaagcctgtaggtgccccccccttaaagcttcacatgctaatacaagataaaaccaaagctctaggagtgctgacagactgggtggcatcggacaaaggccctcgcggcccctcttgggccttgggcatctctccttcactccccgcctcaggataaagcttggaggtagctctagcccctctaccatctcatcccttccgaattcttaatgtctcgggagtctcaggttgacgctgctcctggcttgggcgggaactgcgcatgctcggtacacaggccctggggtctgactgggcgcgctgggttcggcgctgctcggcggtcgcggtgcttgtttatctccgcgcgggcagaagcttccgagccccgcaaagcctctcgggagcgctcgcggcccgtcgcctagggggcgggg

SEQ ID NO: 43234 - DNA, 1265 bp, Artificial sequence
  human replication origin
aagagacggggtctcgctatgttgctcaggctggagtgcagtggctattcacaggcgcgatcccactactgatcagcacgggagttttgacctgctccgtttccgacctgggccggttcacccctccttaggcaacctggtggtcccccgctcccgggaggtcaccatattgatgccgaacttagtgcggacacccgatcggcatagcgcactacagcccagaactcctgggctcaagcgatcctcccacctcagcctcccgagtagctgggactacaggcacgcgccaccgcgcccggcggtcggagacgctgcgaaaagctactagaagctgcagggcagttacgtcattggggagcgggggggccacgccgggcgacgtgagcttggacacacccacactgggcggtctggaggctacgttagtgtggcgtcatccgagctgggcagccgttctgccttacagggttgggaccccggaagcttatcggcgcggttgcggccgcggctccctgtgttttgatcagaacaccacgttcctgcttaacagaaattggtcagtatgcgcttaatgctcatagtgtggcgtccggacacgcagcgagagaaaaacgcaataacctggtccgtcagcgttgcttgcttcagcaggccttaaatatgtgctgcatcttttgggggacgttacttaagaggcaaacatctggctcgaagtcttccattattttcagcaagcatttaggaggtgactgcactataaggagaataacccacagtagcacaggttgggagtctgcacagtgccgaggccagctcagtcttcactattcgaacgaaggaagcctggggcaactgtttgttttctctgccctgcgtgttagttgcccgttgtttttggagaaaaaactagtatcggggtatattggtggaaaaatttggatttggcagcttgaagccttttttgcgacaagcttaggttaggaagggatagaggggaggaaagaaaaaataattttcgaccatagtagatctgcgaaagcagaccttctgtttgtcctcttatctatagtctttccctcaccccccaccccttgtctcctaaaaaccagtccagactttccccgccacctccgtccttgtagcagataacgttgctccttccttcatggataaattgaaggccaacagacaaaaacttttcaactctttgctgctctgtccgctctaaatttatctttacaccttcagagaagagcacccttctg

SEQ ID NO: 43235 - DNA, 1190 bp, Artificial sequence
  human replication origin
aagaaaggggcttttgtcactttgacaattatattcctaattccccctagccttgacccgcattccaaggccccgacaaggtgtaaagccctgcctttctgatagtcactcctcccctacagtaatcaatctatcaaccttattttcagataaacaaggaaggcgaagggagtgactaggggatcttatttactacaatctaacctcagacatgcccagccagctcccaaaacagaaacaaaaatcaaacttgtcacaattgagaaaaatataaaatcaaccttcaaaagtacacctcacgcccggccatgtcaaccaaacattttgcccactcgggcccccacctcgacacctctccccagccgggggttcctcacccttccttccacccggacaccaccgccacaacccgaggggcaggagcggagcctaagaacaaagaaggtcccccaaaatcccccccacgccggcaaaacccggagccgaatccattgtttataccaccccacccccacccccgccgcacccgcccccccttcctcccgagggcagcctgagccccaggacgatcactcgccccgcgctgggccgtgccctccccgccctgccctgcccgccgcggcccggggatcccaccactgagaagctcggccgcagcaaggcggcgtcggggggccgcagggcgccagtgggggcagaggctattcctcaggacaccggcagatccatcctcatctccatctccgccaccctcctccttcgttgcctcccgggcttcctcctctcctgttgtcagttgggatcagctgatcggagtgaacttctcccagctcggactaacaggaaggcgtgagcggtgcagcccagaaagggaggagcgagagagggaggatcccggcgccagcaagggcgtagtgcgcactgcctcctgggagatgtagctcctcgaggcgcgctctcgcccctcatcccggaaaggaagactctgaatgactacaactcccagtactgaagaggctgctcttgcgaggaggcggtggggacaggctacggaggatttcgggacttggagtttttgcattgagtgtggtgtccgcaggtttcagcacgttcttttgggttgtaactggggaaggcatggtgctacattagagaactgatgtaataatgtctagtataagtgggaaatg

SEQ ID NO: 43236 - DNA, 1000 bp, Artificial sequence
  human replication origin
ggatggtcgaccctcagatacgggagggattgagcgatgcccaaggagagcaggagaacactgcgcttggagacccctgagagccaggggcgggccgccccctaaagggaccccggagtcccgactctcagctccagctcttcctgtgacaccaccctccggacagagacccaagctccaggcccggccccgcccagaggttccagggagaagaccaggccaccgcccactgcccggcgtcggggaggaaagaggaggagcctctgtgtgcccacatctctggccgcccagggcagctcggctcggtctcgcaaccccagcccactggttcgggagacctcaaaggctccaccgccagcgcccccagcgctcactgtgtgcgccccaccccagccctgcctgcgcgccgctcccgccaccctcgcctcagtctctgggccggaagccccctctcctcccccgccgcagccccctcctagtccctctccctccgccgatgcgggaaaccttctccgccccgtcccgccctcttcctccagttgcatctccgcccggctcctccgtccagtctccaacccaggccccgcccctccccacccatttcccgccctgggccgggcccccggccccaccgccccctccccggccccgccccggcccccggaagcctcaccccgcccccggccccgcccccccgaagtttcttgggcccccggcagccggcgggacagaacgcggagagtcgccgcctggccgggcgtagacgcggtggcagagcccgcgcggcgctggaagcgagtggcggagcggcgggacctcggcggactcgccatggaggaggaggtgagggcggggcccggcggggcgttgggctggggtcctcgagcccctcacggggattgcggtcctgggctcaggccctcgttcctgcccgccccactcccgccagtctcacctcaggaagagcctgggcaaatggggcaggggcgaggggctggat

SEQ ID NO: 43237 - DNA, 1120 bp, Artificial sequence
  human replication origin
tactttcctcccagccaaccgcccaagccacaccaacctccgcaatagaaaacgctcggagaacacgatctcccgcccagctcttttcaactccccgcggaagtgctcacaccggaacccctctgtgtccgcactttgccattggccgaggcttccgcccgcttccattcgcttcctcccacaactcagtcgggctgcgcggtccgtaggagtcacttccgcctcgtcccaccccgccccccggtccctttctagcagcttccggcttcggtcccgccccgccccctgtggccccgccccgcccccgcccccgcccctggctggcggtccagccccgcggcgccgcttccggtgcgggccccgccccggctgtggcccccggctgcggaggagtccgagacgcagctgccgcgccggggcctgagctgccgcctcctccgccgcccgaaaacccggagtgccccgcacaggtaagtggcccgggtccgggctccctcaggcatggcgggagaggaggctgcgacaggtggaggggccgaggccaggagccgaggcaggtgtagagagagaggggaatgcgcgagtcgggggcgcggggaccgcgaaggaaagtgagagcgccgcgggagccccgagcgccctgtgcccattagggcatttgagataaagcgtttgagataaagcgatgagaagggtgaggggccctggagctgagtgggcgcgcagataggtggggcgggggccatcggaagagccagcggattggctgggagggttggtagaggtaaaaatgatagggctgaatggggggaggtgaataaagaatggggggaggcgtgcaggggtgaccgggaaggtgggctgtggggcttacaggggcccggggccaaaagaatccggcagcaaaagcaggggaatggtcagcaggccgggttcaaagctgcaggtagtccgttgtacccggcttggtggtccgggaactttaggggaaatgggggaggggcccgtgtgaagggatgaagaggtttagatttgagacataagttctccaaatgtaggcaggtggcattgtttggatcgctggctgcttagggactgcgggaaaatgggctctttgggg

SEQ ID NO: 43238 - DNA, 1230 bp, Artificial sequence
  human replication origin
caactttctcctttactcttggtacttcttgagctccaggcctacttttctctctctcactgccaaacatttgaaatcatcaccctttattaactccattgcttcattggctaacatactctttagacaagctcttcaactcagttctgtgcctggtgcacagcaggctccggctgcatgttagttccagccatcttgcacatttgcatctccttcctggagaaggaatttctccatggttagcagtgtgtgctcactcctagtcaccagggcctcatctccgtgttcccacaccctgaccttgctgccgccctaatgctgcggacccagtttccaggtacgccgggttcttggaaggtcctgccggtcaccctcccagccttctgccagactcactgagttctcaccctgcacagtcatcgtttccccagtaaccctgagagatctcccagtctacctcttcgaggcacccgttgccagtcctccatctctgtttgccgcgcgtccctcggttaccccagaggcaacacgtcaggctgccccgcacctccaagcctgcgcgaatgtccttgtagccagctatgaccaaacatttagggcgcacctgagcgccaggcccacgccacccctgcttgctttcacttaacagcctcgactaggccccctatgcgccaggtctcagtgaagaggacgcagtcccgggtcctgggcgctctttgccgggcgagacagctgcgtaggcagatcctgttcctctagtgggcggcctcggcccctgcccctgccccgaggcgcgtcagaggacaagaggcccaggtcgctggcagcggctgcctgcccgaccgcacagggtgcctagcacgggtggcggggactggagccgggcgggggccggccggggtcgggggtccagccctgagcggcgccgtccccgccccgccccgtcccgtcgcgtcccgccccgccctacccgccgccgccgtcgtcgccgtcgccgggcctgcgccgcgcagcccgcctcgggcgggaggcgggaggcgggaggccgggcccaggccggggcagcccctccaccgcaccgtcctgggccggtgcccaggtccgagtcgccttccgcctgcccccccccccccccaatcccccgccgcggcagccccagccaggtcccgccgccaggccggctcccgcccccgctccgcccccggagccgcagccccgcccgccatcgcc

SEQ ID NO: 43239 - DNA, 1300 bp, Artificial sequence
  human replication origin
cccgctccgcccccggagccgcagccccgcccgccatcgccgtcgccatgttgtggctcccgcagccggcgctggggacgcgcgcggccgagactctggcctgcagtcgccgccgccgccgccaggtaagcgccccccgcgggccgggccgagcggggcctgcgggccggggcagccccagcctgggcccgggaggatcgcagccgggaccgagtccgagcccgagccggggcccggccctgcagcctggcggaccctggccgccgccagaggcggcagccacttcccccgaccgccgcctggcgggcccgggccgccaccccaccccgcccccggccgtcgggcgccggccccttccgccgctgcgaccgccgctgcgaccgccgctccttggcaggccgggcacgctgctgtcctccgcgctgggcgggacgtgcggccgccctcggcgatagccggcggcccccagcccgggcacggataacggtgccactttctccctctgggacggcctgtcagcccgaccgtccccgccgcccgaagagctgtcgccgtcacagggcagacacttcggggaacgaccctctttggcgctcctcagtactcccctcccctgagcccaagttctgaccctgaggaaggtttctcccggagcagacaggtattcctagagctccagagttggggtcctcaggggtgaccaggcctgttgatcagggtgaaaattgtctctctgcaagggctcttcctgccaacgagggggttggcgggaggctcagtgtgacctgagggaggacaggagagcgtctgctggacagatggcctcctggccttggatcagcgtttgtgagggggaggggtccgtatgaccttaggtatgcctgctcctgagtactgcaggattattgaagctgtttagggattttaaaccattttttgagtaggccaaaggtggcattaaaggtcctggattggaataagtccacaggcccacccagggaagcatgtttggcatccaggactagtctagaataggactggcagtagaagaatgggacttggggagtaagacggtatttggcttatggtttgcccacttgagttcaggcctgtgctcatggagggcctgtagggtgcttctgtcgcgggtgcagtgtggtgcacagtgtggcagagtgcggaggatgtggacagacagattcctggcctggtggatgcttggtggtattttagtagtctgtttcctcaacctcactgttacgttacacagtgaaaggggcagaagtgtggtgctagtgcg

SEQ ID NO: 43240 - DNA, 1200 bp, Artificial sequence
  human replication origin
cagtccacgacccggcggccccgcggctccacggcgcggaccctcctgcgcctgctgctcaggctgctgctgttcctcggcttgctcgccctggccctgcacttcctaggcctgcagcctctgcacgccgccgtggagcgcctgtgaccgtccgccgtccgccgcccgctagggtcggccccgctgcaccctcgcccacgcccggctccctgggcttgtaccagcccctgccccgccttctgggtttgagcgcgcctccgctccgccccttgaatcctggtcacgcccccgagccgctctccagacctagcccggaccgccgacttctggccacgcccctatctactcccagaccttgccttgcgcccttcctgtgttttggccccgcccctgtcctgtcccgccccgccctccgaagtgggcacgctcctgctccgccccctgaatcctggccacgtccctggtcggcccagacgcgtagccccgagtctctttccatgttttgaccacgcccttgacccgcccttcaaattgggcacgccttcttccccgctcactgatttcctggcctagcccctgagcagacctccagacctagccccgcccccgttttataaccccgcccctgcttcacggcttgggcacgcctcttccccgccccctgacttcagagcctagtcctgagccgctctccaggcctaaccccgccttcatgtcatagccacgccccttcccgcccttccatgtttgggcacgccttctgagtcctggtcacgcctctgtcccgccccctgaatctttcctacgtccatgaccctccctccaggccctggccctgccccttttttcctccctccggcctgtccggtttctgatatgggccaaggctcacagcttcctccgccttctggaccttctcctagtccctgcccagtcccggcccacccccagattctccctcattctggtttcgccccctttctggtcctccccgcgcgcttgagcccaccctttggcttctccttttgggtctgtccttgctcctgcctctggacccggtcccgcccttctcgcgtgtaattgagtcctggccccgccccctccctctctggcttcacccctttccagctccgcctcccgggtaggttctccccggaaccaggctgccgcgtcgctatgggctaacgcaggctcgggtga

SEQ ID NO: 43241 - DNA, 1150 bp, Artificial sequence
  human replication origin
caatcgaatactaagcggcaaaaaagttgtgggagacggcctctctccaaccggaatgtccaaagacacctgagtgccgaaaattcccccatactcaacgtctgaattctcccctctgccctctcctcttcgtcggaagaaaatccgctaacaatcccatgcctgaccaagtgggaaaagctttcaacttcactctacttcgtccaaccctcgggataacgcactcccagatcccgacctccccttgaacctgccctctgagatcttctagtttctcccgagggtccctcagaaaacccagcccgttcctccccactgccccttaaccccttcccctgccccaggccccgtccgcgccccagcgcagaccatcacccgccgcctccccgacccccttcccggagccctcaacgctggcctgcccctcggggcctcctcctcgcaaccccacgcgatgttcctcccgcccgcggccccctccccctccccgcgcctcaccactctccctcagcagcgctcccgcgagcaaggccgcgccccccaggcgctcgccctcgggggtccctggcggaggggcccctaggcccaccacgcccccgcggataaagggtgacgcagcggaccccgcccctgccccgcgggcccggccgcctcgctcacccacacgaagaggctgtctgagagcaggtactgggccacatcgcgggcccggggtcccccggcgctcggccgggcgggcgccggcggctcaggctgcagcgaggccgttagctggtccggctcgccggggccggcctcgggctggctgagcgcgcggtaggcgctgatgatggtgcccagcagggccaggccgctgaggcccgtgtaggtgcggaggctgggccaggggaagcgctcgaggaagagcagcggcatggcggcagcggcgacctctggcccccaggcttccctgcgctgcggccgggcctctgcggcggcctcgcgaacggcgcccacgggctctggcgtcgctgccgctgccgctgccgccgccgccgccgcgccgggccgggccgggccgctcctggctgctggcgccgctccgccccgcgctgctcccgctgctgcccctgccggcgcggaagagcctgggcgggctcgggacaggccg

SEQ ID NO: 43242 - DNA, 1080 bp, Artificial sequence
  human replication origin
cacagcgcaggacccacacgagcccagaaccatcacggcctgctagttcccacccctcccgtcctggaggaccgtaggtggacgctcttgcagagcgcctctcgctggttggggcgggggtgggcggagccagcaccgtctgggctgtggaagcggagggggtggggacactctggcccggttctcggtggtgcgggagcgggcgggagcagcggccgctctggtcggcggacgtgctgccgagtagtcccggaagcgaagcagcgatggcggagagtccgactgaggaggcggcaacggcgggcgccggggcggcgggccccggggcgagcagcgttgctggtgttgttggcgttagcggcagcggcggcgggttcgggccgcctttcctgccggatgtgtgggcggcggcggcggcagcgggcggggccgggggcccggggagcggcctggctccgctgcccgggctcccgccctcagccgctgcccacggggccgcgctgcttagccactgggaccccacgctcagctccgactgggacggcgagcgcaccgcgccgcagtgtctactccggatcaagcggtgagccggggtttttcctcccccagccccgagctccggggctcgaccttccccgccccccaccctctcccactacaactcaccccccacccactgcgctgccctcgcggcggcccacctccacggcccaaatcttgccagctccgggcgtcgggatccaactcccttctccccccaccctcagacccgcaagcaccaacccccgcctcgtgtgcccagatccgaccccgcccctcgacaacctcccgtgagccctccgtctccattccggccaccctcccccacacctcccacctccgggtggaaacccgaccctttagcgcttcagtaacgccccctcccgccttcggcgccgcccctatttccccttccccaccccaaccttgctagatgctgcccgcaggccccacccatcggtcccctctcttctcctctggagccccgttcctaacacagacgaactcagcttcctttgccatgcctctgactcgagccaa

SEQ ID NO: 43243 - DNA, 950 bp, Artificial sequence
  human replication origin
gcaggtatctggtgaggattatcccctcacgtgcccccggctccagctagagcttttgttccaccttccaagccccgccccttagcactccacatctcaaccctctagcaaggcctattccaagttccaccgcctcttgcgtcacccttactgtcacctcccctgtaacctccgccccacatggcttcaccccaaagccccgcgctctgagcgcggccggctccaagctccaccgcctcagtgagcaccctccagatcccgccctctaacccccgcctacagccccacccctggaacccccgcgtcctcagcgctccgccctctacttcaagttccaccaccactcaccgcatcaccctccggacacacctctctaaaccccgcccacaaccccgcccctcaaagccccacctcctcaaagccccacccccggctccaagctcctccgcctcacagagcgcatcctcatgtccgtcccctctaaaccccgcccacattcccaactcctgaggaagccccgcctcctcccgaagctccgccccttagtgcagtaactcacaggaccacctcctcagcaaacttttccccaagccccgcctttcaatgccctgcctcaagccccgccctcttgactcaccccacaaagccccacccctcagggagctggacaggacgcccaccccctgccagaggcccagggctgcgagcctggcctgtgagatgccctaatctgtctgggtccgagttcccagggagaggcgggaggccactgcaggggcttgggttccagccccatgagctgctggctagtgcaactctgcacagacagatccctcggggatgcactgtcggtaataccggcccctccaaagtgtccccagccggtccatcctttcccaccacagtggccttcaagaaacatcccctgttcttgccaccccaaagccacg

SEQ ID NO: 43244 - DNA, 965 bp, Artificial sequence
  human replication origin
aggtgtcctgcgctgaggccgggctgcaagaggggtggggagtgtgagcactgcctggaacacgaggccgagtccaacagggaagactttcatggggctacacgagcagctggctgtggaaacaggcctgtgcacaagacgcatggcaggtgtgggggagggaggtcccaggggctggggcccagctgccggggccaggccttgcacgtgggcacggtgtcctgaggtcaagggatgcagagttgggtccagggaggagggaggggctgagaagtgggcaggggctccctggcggtgatggggacaggtaaaactgggggggtggagggggcaggcggggggggatgggcagtaggcctgcgacctgagaggttgtggtggggaaccggctgctgagggccctggtcagggcagcgacttggtttctagggttggagagaggaggaactagctggaggaggacaggactcagtacagagctggcatcttggtgtaagggtgcgtgaggtgggagggcctggggaggtgggtgtgtgtggggtgggctggtgaggcgtgggcgaggtctcagtgctgaggccttggttgagctgtatccttttggcagatttatcacacgtcctgatgtcaagcaaagcaagatggctgagttcctggactggagcctgtgcaatctggcccgttcctccttccagaccatgcagggggtcatcaccatggatgggacgctgcaggccctggtaagtgctgcccgcaggggctgtggagatcgcagggaaatggcgccttacatggggaccacggaatgatgttacctgtgattccatcttgacgtaattggaaccccgtgggattgatttaaccgggccagggtcttgggcagtttccttttccctctgctttgggtcctgcctcaggcagggctggtttctgcgctggtgctggtggatgggcttggagcccca

SEQ ID NO: 43245 - DNA, 800 bp, Artificial sequence
  human replication origin
gcacatgataccagcatttccaatagtgaccctaatagacaaagcattttggagttctgacatcgacagggagcagatcccagtcatgaagaaacaacttgagtgtgtgacggcaagaccatgaaagccttcctttgcaagcatcgcctgggctcttctgctcacccaaggcagaactgaggaggggtggggtgggcattcctcaccacaggatcctttttcttgagcaagcccatcttaagatttgtagggagagctggcttagagagacttccaaagctacacttctaactgtcctggcctttggccccatctgcctgtcaatttcagtctgagtccacaattcccatgtttacggctctggggatatctagaacctcggctttggagcgctcagggatgctgctaggccagttccctattgacctttcagggactctgaaatcaactttcctcacacactctgaattgtttgcgtttgttttcatcctgccagagccacccgcccaggccacccatctcttccctcctccctgccccctcccctccctccggcctctctggctctacccccccctcccccgccctcctctttgttgtctcctacctgctggccaggctctgcctgcagtgctgcctgaagggcatcaggtggtagttcatggcgtccagcagcagcttctggcagaccgggtcggttcgcatgaaatccactgactggacccgctccaccagctccggggccgggatgagggcgaagcggaggcgcttcatgaggtcaggcgcatactgcatgcggg

SEQ ID NO: 43246 - DNA, 1070 bp, Artificial sequence
  human replication origin
cgcagtccgccaacggcgcgcagtccaacgttcgccgaggccacgccccggctcgtgtcagctcctgagtaggcggaaagagggagggggcgggacttgggcgcagccaatcagctgtggaggagcgaaaaggcgggaaaaagcggaaccaaaagaaggctgaggtggcgctagggaccaggaggggtgggggtggcgaaaggaagggcgggccctcaggtgacgcagattggccctccagagaaggggcggccccttctcaggtgccgtcacccccaaacctcagcactgccattccaggtccttaaaggggagaccgcgattctaagaaggtagcccagtgccggggcgtggcctcattctgaggttccccacaaatccgaggtcccgactcccagcttgaggaggtgcacttccgtgaaaatggagctgaattcgaaagggaggcccttattctgggaaatggccccaagtgacaaggacagcctgaaatatgccctgagatacctgggttctccacgaagggtgctgtcacccccaaacctgaaagggattattcggtttcagacctcccaggggctctgatctcaatggccgcaccccctagtccccagaaagtcccacctgtgtcctctcacagaaggacccagtccctctgcaggcccttcagctcctgggtcacaagacgtggtccccaaatatcccagccctcccctgcactccacctctgggatccctgacagccctctcgcccaacaaccccctcagcccacattcctgacttctggaacctgaagcagccccttcacttatgtcccccactcctgggacccccagaatcaccctcaccccaggccctcacctctctggaatcctccatagacccccttaacccacacctcaacccaggggacccttagcgactctctcatcctgcacctccacctctgtgacccctggcagccctccccacacgacaccttgcctgggacccctagtatccccatcctatgcccccctctcctgggacccccagaaagctccctcaccacacacaaccccattcctgg

SEQ ID NO: 43247 - DNA, 940 bp, Artificial sequence
  human replication origin
cgcaggaagacagcgccactgacactctagagaccagcgggcaccgcctggaggcgccttcaccacttggcggttccgggtccgcgccccaccgcgccacaagactcacgcccgaaccacgtgatcagggccgtggctccgccccgctcccgcgccgcgcgccgcttccggtaggggcggaaagcggaagtgtgggagggtctgcggggcgggctcaggaggtccgcgggaggatggagcagtgagcgggtctgggcggctgctggcagcgccatggagacggtacagctgaggaacccgccgcgccggtgaggggccactggctaagaggacgggcatggggtcaggggaagaaaaggcgggaactggttgaggggatacacctgtgtgggagtccccggagctaagcgacccagccgatggggcacctgctgagtgaggggggggacgtctggtgggtgagggtccggctgaggggagcatctgctaaggaggttagacttgggaccggttagagggagcactcgctgtggtgagactgtgctgaggaacgtggggacaagttagggagagtacctgctgaggccgggccactcgggggaacgctatccaagcagggactcacggaggtgggggcgaatgctgaagcagggtgagaatctgtgagggatctctttaagggggtggatcgagaactggccaagaggaaggccgggtggactttctaagggtctgaagtcccacttgaggggtgcggtggggggatctgtggaggggaaaagctttgcgcctaaggctgaaagcatgcgaggaaaggttgagggtctagcaagggaggggatggtggagggtagcatttcagaggatgctgttggtggtgtccccactgtaggatggcatcttttattactgatgttcagtgtcttcctaatggtcttca

SEQ ID NO: 43248 - DNA, 1356 bp, Artificial sequence
  human replication origin
ccacccaaggctggataaggaggggtgggcgcgcatggtgggggaggcgcaatgcagagaagtgggcgcacaccgtggggcgtgatagggaggggtgggcacacactatagggggcgtgatggggaggggtgggcgcacatcgtggagggggtgatggggaggggtggacgcacactgggggtgtgatggaaagggggacgcgatggataggggtgggcgcacactgggggacgcgacggggaggggtgagcacacactgggggtgtgatggagagggcgacgcaatagggaggggtgggcgcacaccagggacgcgatgatggggacgggtgggcgcacaccaggtggcatgatggggaggagtgggtacacaccatggggggcgtgatggggaggcgtgggcgtacaccggggggcgcgatggggaggggtgggcgcacaccgggggacgcgatggaggcggtgggtgcacacggggcgcgatgggtgggagtaggtgcacactgagggcacgattggggagacacgaaggagaggggtgggcgcacactgggggacgcgatggccgggacacgatgcggagaagtgggtgaataccggggtcgcgatgggcgccctggaaggacggcagtgctgctcacaggggccaggcccctcagagcgcgccccttgggggtaaccccagacgcttgttcccgagccgactccgtgcactcgacacaggatcccgcacccagggcgatgccgggggagagggcgaccccaaccagcaatgactcaggagaggagcacgcaaagacgcttcggggacactgctggggcgggatccgagggcgccgcgctctgcaggagcagcagcgcggggcccgacaccgggcgctcaaggaggcgctgggcgcgcgccttcccagctggggaggagacgggcgtggagcggaggcgtggccaggcccggagggggcggagctcgcggcacagcgcgcttcgcgggggcagagggggcgcaccttgggcgggcccacttaggggcggggctctagagggcggggaggggcggagcctgtcaggggcgggacgcggggcggagtcggggtgggggcggagccgggctgggggcgggacgcccgcgatagacgcgcgtgcaggcggggtcgccgcgcttaccttgggcttctcctcggacatggctgcgcgagcggcgcggggaggcggcgcgggggaagcagcgcggagcgggcgagtcacgctctcggccccgccgctctcccgccgcaactgtgcgcggggccgcgctttatcccccaaatcccggcgcacccgttggccggcacgggggtcacgtggctgcgcgcgtt

SEQ ID NO: 43249 - DNA, 850 bp, Artificial sequence
  human replication origin
gaaagacatagtctactttttaattgccacctcaaagttaaccccaaattttccaaaattctaagttcaagtgggtagcgagtttgcccttcatgcagcacacttacctgtgagtgctagggagtggctgagagctcgggggtgggaggagaggcccactgcagtgcccaccacagtgcccgctgcaggggtggctgcaccccgagaatggtgggggcatcttcaggagcggcatgctggtggagggtagatgggagctctgacatggccctggagtgtggggggcagtggcagcagcaacagggcactctgaagcctgggcagggaaaggtgctgccggggtggtgggcagcaggtgtgggtggggtggggagccaaaggagctggggtgagacgggattagagatgctggctgcgggtggtggccggtggggctgttagggggagcagtgaggtctgagtgctggtggtgctccgagacggggaaagcctcacctgtgggcagagggaggagaaaggggtcagaatgggagcccagacctgggaaggaaagcccacaggctcactgccacagcatcctgcttctgtgacaagagggcacagcctctcagcacaggggaccctggagctgcagaagattctgtgtgggcagcaacacagctgagcaggctcaaggagcccaggcccaagcaagaaggtactaggaatgctgattccacacaaggccccatgccttttctgcagcatgagcagaagatatgcattctgtctctgagggtctctctaggatctgcttgtacacaggtgctcctcaggcctggaggatgatctgcagaagccagtggagcag

SEQ ID NO: 43250 - DNA, 1082 bp, Artificial sequence
  human replication origin
agatgcagctttccagtagagagattgccacgagcaaagcacatgtctaaggaggaaagagtggcctgggggtgggggtgggggtaggggagctagaagatcagggtagagggggctggatgaaatacagaattgagggagggggagtgagagtaagaaatgacagaagctggggccagatggtgaggggccagataaaaataaaattagcatataaatggactggctttgctcaatcaaaggaggattttctttcttaaagaaagacagtggctcttttcctgatttttatgacttgagctcataaatcaaatcttcagagctaccgacaatgtcagcctgctgatgtttaggagtggagggtgactgaggaatgcggtgtgctgcggatagtcatgtcatcagcaaggatgtctcagagtctgcaaacccggacctctctgtattggacaaggctagggaatgactttgagaagaactgaatattaaaggaattatcaacttgagtagtaagagagtttctaagaatgatggcagagccactctgaagttcctgaatgaggtggaggagggggagaaagtggtgtggtaaggaacttcagtggagaaacagcccagagaactgggaaagcaatgacttggaagcagcaatgagttggtgttggaaaaggagtggctgccattgggaaggtttagagggtaaactttgagcttgaggaaaattaagttacatttaatgtgagaaaatggaggaaaaatgtgatctgtatctaacagagagaatgggattgagttgagtatctaacacagataatgggattaaaaaaccccaagaggatgaagcctcagagtagcataaaggggctgggcagcagaagagctctgggccaagctcaccactatggaggaagcaggaagggtgcccagggatggcgggcgggggcttgggagcaaggccatgggacatcggcactgtaaagggatggggaggttagagggtgtatggtggttgcatcgtagttagtagggagccttgtgaattgtcaccttagaggcccaaccaaaaagtgagcaagccagcc

SEQ ID NO: 43251 - DNA, 1000 bp, Artificial sequence
  human replication origin
gacagatgatttaagctgggggtgggtgggtgggagagataaggaggccccagccccatgcagagaatggcacatgatgaccttggtttatttaaagtggagtgctgccatggccagctgtgccccaggggtgccaggcctacacaggcctaggcggtcagctgtgccctctgcccagggctcagcctttactaggtttctgatgtccttatgctctgacatcacctcaggtcctgtgacttacccccctcccactcagcagggaccttgttctgaagactttggccttttcttggatgctctcgggcagtgtggcaggtggtgtcaggtggcagtgggtgatggggaggcttggaggctggctgggggctgggggtggagaggtaccactttgtcctgcatggctggctctgggtgtaagtgcagtgagtcacacctttcaggtagtggtgaggagagagggcagtgcatggaccttgggtatgtgtgggtgtggggttcacaccccatatgttcccatcttctgagaagtctaatggctgatctgcatctgcatgtactgtgggacaggcttgcataggactgtgtgacttgtgggtgtgagtgtggggatgtgaggatgggggttacatgtgcctgtggatttccagtgagtacacctgtcttagacctgagggatctgggtctgtgggcagaggtagtgacatgccatacagggccagtgggagtgtgtgcactcggtgagtgtggggtgcgtggggttggtctatggtggtgatgggataggtattgagtgtgatactgggcttgggggttgggggtgagtagaggtcacagtagagaatgaccacaaaatttcaatgtaccttgatctgtctttattttaatttaagctcggcctctgccagggctcaggttgctgggtaattgttggtagtaggggcagaatttagggcctgaagatgtccttggaggagggagacatgccaccttcagcaat

SEQ ID NO: 43252 - DNA, 1100 bp, Artificial sequence
  human replication origin
cccggtaggtctcgccgaagactccgcggccgccagccgccggcacctcacttccgcccgccgcgagcgccgagcgtgtagatccgcctggcagtcgagcgccgagtcctcgatgggcggagccttcaggggagggtagaggaggggaggagaccggcgcgggtgctggaggtcagcaggggccgtgggcggtggacgctggaatgccttgggttccgagggacccagctgcctgaatggacacgagtaggaggtttttgctgggcgtctttgcggtggcgggaagcggtgagggagggaaagaaggatacaagctcaaggggcaggccgggtgcaccatccatccccgtgccctcgggtcatctcagggagactgtgggatgatagtgcgtttgtgggccacagttcacaacgatgggccctgcatcgggtcagaggacccctccggaacagggggatgcacaaggtcaagagaatgcatggaatcagagggctgcaccaggtcaggggggctgcaccgagaccagaggaagcatcaggtcaggaggatgcactggagtgtgcatccccagggggccacactgggtaaggaggatgcaccaggttaggaggcagcactgggtcagaaggatgcactggaatcaggggactgtaccaggttggggggcgtgcctcaggtcaggaggaggcactggggtccgggggcaacattgagtcaggggcagccctaggtcaggaggatgcatggggtcagggggctgcaggggtttgagggctgcactgggtcagggcgccataccaggtcaggggatgcgcaggatcgggggagatgcccggggtcgtgggatgctgggggttggggggatgctcggggtcggggagttctcgaggtcgggggatactcggggtcagggggttctcagggttggggggatacttagggtcaggggatgctctaggttgggggaagctcgggttcaggggctatggccagggaggaaggacaatcaggaaagtgggggtagcggattctggaagctaaatagtttcaggaaggaggaattgatagccaatgttcagaagtactgtgaggccaagac

SEQ ID NO: 43253 - DNA, 1341 bp, Artificial sequence
  human replication origin
ttaatgctttgacccatctaagatacgaggacaggagactggagaagtaaacgaaaggcaatggccgaggggtaaggcggggaacacagcaggaaaaggacaggttccccttcaccttcacccccagtgttggcaacgtcccagggattctcggagctgaagcttcttcagaaaacagtcagcttaattaagatcctgcccttggggaatctagaataaatggcgagtagtgggcagctttccccaccagtcgcaggatctaaaagcaatgagtgacggttgtctgtgcagcagtcagagggaagagcgacagttccagacgaggggcagtcggacttctccgcagcctaccgccagcttggagtgcagatctccaccgactgcgccacagacagtctcagtccccagcagtcacaatatttgcactcccctttcttcctggcctttcaacccctccctttccttcctcctcacccctcccaccccgcacccgagagacagcctgccgtcccaggtccagcccgcgcctctgcgcacctcccggcacccggcgcaggtcgccggccagggcacacacgcgtccccgcctgctcgccggcccgcaaggcccgggctgcggcggccgcgggcgcgggaggcggaggcgcaggcgccgggctccgtggcagcccggcccagccccgccccgccccaccctccggccctcccctccgcttagccgtgctctcccgccgagctccgccgccagctccgtgctctgcccggcccgtacgccgctcgccaccgcggctccccgggcgggaaggctgcgccggctcccgccaagggggaggcgccaccccgccccggggcggttgtcttgctgggactcctgggccggtcacaaagcccctctccgctgacccggagggacgggagtcgggtgcgcgacggcggctccccacccctgcactcagccgcccgccccgctcctcctccttccctccctgtccctcctcctctcccaccccccgagggctcgcacaccccgcgggcgggaaggtgccgccctcggggcggacaaaggggcaggccgggcgggaggggctgtagccggcacgcgcggccgcgggagggcccgcctcgccccgggccgccgacctgacacctgctgggcagcctgcgcggcctggggcgaaggccagcgggcggcggggtgggaagcgccagcgcaggggcgtgtgttcgggagggggtcgcggacaggtcaggcggcttgggacccaccccacccgggcaatagtgacctactgcttcgctagcgtcccctttcaggtcttaactggactttaaagatctttt

SEQ ID NO: 43254 - DNA, 1000 bp, Artificial sequence
  human replication origin
catcctccgcatctcctccctgcatttgatcttgttgattcctggctgctacaagggcctgggggccacagtctcaactgagcatagcagcaccgctgctatgggtctccagctcagggaggccccatccgggatccaggcctgagttctcacggccttgcaacttgatttttccccttccatccagaaagcattgggcagggggtaaggggaggtcacaagccacatctgcagacactgcagagcccctgggtgcgctcaggagtcatacacagaggaccaacctgtttgcctggacacctgcgtgtcctcccctggatggcagaagcctttgatggctctccaggtgctgctaccattgtgcaggtggtgacatcccaccccaatctcacgccagatccagtctgtgcccatcctaacagctctgtgttaaagtcatgtcggagccaccctcctggtccacaactgccctgttctccagtgattgccacagcccccttccccaccccggtccctagcctcccctccagccctgccccagcctgtcacaacacagcagcacagggctgcttctaaacctgttggattacccccacccgctcagaacccccaagagctccccaatgtccttcttgctcagagcacaagcccgggtgattgggtgaccaggacccagctcaccacccccgcctcataccccaccccacccatgccccacatccttccccaccccacatcccacccgtggtagcctcgtccacgccagtgcctgctcagctgtagcgaggctggcttctgctgtacctgctgccccagggcccttgcacccgctgttcccactgcctgaaccttctgcccctgtgtctccaaggcttgctctgtcactttctttgagtctccaccccaatatccctggctcaggaagccttccctgacccttccttatgaaagagccacatggccgtcggcagcaggcacccagacgccatcctgacactgg

SEQ ID NO: 43255 - DNA, 970 bp, Artificial sequence
  human replication origin
ccttcgcgattcaaggctcttgggtttcccgctttggccgcctcgccaaacccaagtcttacactcttagtgaccccctcctttcctccttcccccttaggtcagcagggtttactcattccaattgcaatgctccatgttgccggagtagctcctcgctagaagagagattagttatgtcaccgtcggctcctcccattggtccgggcgtgtggagcgcggcgccatgacgtcagacgcccaaatgagtggggcggtgaggggaaggaggagggaagtaggacttcaacatggcggctgcggcactggcggtggctacggtgacggcctggcccggagcgggcagagttggaggtggtggcgttcgctctccctaggggctgtcgggagctcagcggggaccgagcctgggaggccggccggtgccagcacctttcggcttctgagacggcggcagcagcggcattcaggtgaggggggcctccctctgggggagggggaagaggggcggagttgggggaggggggctggtactgggagactgggaaacgggatggggggccgagcgaggtgaagggcgccggagctaggaggtgggagggaaaagtggccggagatccgcgattcggggaggattctgggagaagggtcggagtgaggggaccggagttgaaggggcggaggggaagtgggatgcggaaaaatgagttcggattaaggagactaataccctactggaagacaggcatagtagacatctatcgggctggactgagaactcggtgggaactagaggatgtcagggagggggacccagattttagtaaagaaggtgagtggtggggagttgagggtgagctggggacgtgcggtgtagatttagttctccctgaggcaatgagattggggagaaaaggtggagactagaccagaggtgagtgatctttggggatatctttggccttgtctg

SEQ ID NO: 43256 - DNA, 1000 bp, Artificial sequence
  human replication origin
gttaaaagctgagcagacaggagtgcaatagattggcctcttcaccccactaaccccaacacccttgctcttagaacccagaacacaagtgtcttcctgtagttactacaatgccctaaactgttactttgtcaaagtactgggggttctgttctcctgcctcaagttgggcctacaaccccttcccctagatagtgcccgcagaccctccgacaccgctacactccttctccattaaacagccccccttccttcaaagcacctccatgtcccctgcccctcatgtacctcctccaaccccccacatcagacagagacagccccctcacaatgtacctcgcaacccccccacaacaaagcgctcccgcccttcccccatagaggcctctggagaatgcaccttgttgcccacacattgagtccccaactgctcccgcgacttcgtatcttccctcaacacacagcagtctccagatcgtctgcaaagcgcacccccatccgcgtcccttcttccacgctcaccctgccccacacctgtagttccgtgggtcccgttgcacttggggacgtggtagtggttggggcagttactgagcagccctagctgtagcctccgcctgcaaacctcgccccttcagtctgagccccgcccccgcaacgcccgggcccaccctctcccttgtcccaccttccaccttctgtggacttgtccctttcctcgtttaatttctcgagctcctcccctgtagcccgggccccgcccccttctgacctcgcacctccttcgcgttttctttgcatttccccaggatcctcagcttttcccaggccccacccccgatccccgcctcctctcggtctctccgcctttcaccaggacccgccccctcggattccagcctggcagaagtcgcgccaagacccttccaccacgatccccctcccatctcagagcccctcctccttccgccccttctccctcacgcctcacccgggcggt

SEQ ID NO: 43257 - DNA, 900 bp, Artificial sequence
  human replication origin
ctcccgctccgagagtcaccgcggtggggagggagggaggcgccaggccgccgggggagggaccggcggagggggcggcatctggctccgcgcgggctgctgaggcgcggcggcggcaacgccccggagggaggcgggcgcgtggggccgggcgccggggcggggcctgcgggcggggcggggcccggggccgcgaattggttaactcagcctgtgggcggggctgcgcggtgcggggcggggccttgtggcgcatgtgaacgctcattgggccctcctggaagggggcgagaccagcgacatagggacggggccatgcggtgggcgggtggaacacggcgccggtagtgagtggccgagtccgcgctgagagcaaaggggaggagcgggccgggggtgagcagggaaggcgggttgggcgcgaggaggaggcggtggcctggaggaggagccgggtaaggctgaagctggcgctgcggtaaagccactctgcgtgtccctatctgctccaggagcacagtgttccggaaaaataatggcctctcccacacaccggtctgtgtttaaaaacgggagcaacaagacggggcagaatccttggtgaggccagtttacccagaaccccggaaaattctgaaatggacgaggttgcagaacatttagaggcgtggtcttcctgcgtcgttgagctgggaacgttgctacctctgagcttggggcctaacctgggattaacctagcccagagagcccagggatgggcctccgtaggtccattaaactcagaaggtcgtgtgtactggtagtgagtggatttttcgggggaagggtgcccatgattaaaatgtttctacagaaagtctggctgtatttggagagggtacagggagaagcagcccat

SEQ ID NO: 43258 - DNA, 910 bp, Artificial sequence
  human replication origin
aggaggacaatagcctccccctgccgcaggccgccggctcccgcgggaggcccgggaccatctggagccggcggccccgcggggctctgggcggggcccgagtcgccccttccccgcccagcgccatggcaaccgaggcccctctcggtgctccccgccgctccccgcccggggtagttgacctgcctcggggcgaacgcggcagcagctccgaggccggctgccgacccccagccaccttccgtgcggggtccccccaaaaccccgccttcccgtcctcgctggtccctgggtcccccaccacagcttacaggtcttgatctccccggttcggacacctcacctttgtccctattctgcttttcctccaaaatccgtatccccgagacacgcgatccttcctctaatgacactgccgacgaggtttcccgagatccagcctccgttcccctttcctctccgggcacctccagtccgtctccgctaagcattcctctcacccgtcccctcgctctcgcgtcctccttcaggcagctgggccggctctccctcccagaacatctccatggcacagtgaagattcgtcttctacagatcagatgctccaaacaggcatctcagcgcttctcagctcctctcatttatcaaccaggagaattccggcctagtcaccgtcttgaggggggtgggggtgggggcagacatttctaggcctgacacggctgggtttctccttggtttgttagcgtctgagtggtctaaggtccaaggtccttaaccaaggtgaactgctgcctgcttaggagaggaaggaattatgcccaaatcatgacaaactcacagagtgccaggtgggtgctaaaagcgcatcatctcatgtgacactcccacccccactccagctctgaga

SEQ ID NO: 43259 - DNA, 990 bp, Artificial sequence
  human replication origin
tctctctgcaaaacggggcgaacctcggcgcggcggccgactcccgagctcccggccgcggctccacttcctcctcttcccctgctccctcgccgctcgctcagcgccgcgccgctgccacctccgctgtcatccccgccacccacccccaccggagccgcagcccgagctcagccgaaacagcgccgcccagcgccccagcgccagcctgcgcggccccgcccggacggggcggagtcagcagagaccccgcccccggccggctgcgggcaggggcggggtgcgcgccctctccccttcccgggcctcgcgcgtggggccgcaggagccaatccgagggtgggagcggagcggcgccctgcggaaagcggattctacctcggagagggcggggcggacaatggagaggtgcggctgcaagaggacaatggcggggctgggggttcggaacgggccgaatcggggagggggttggcctcgggacccggaaggagggagaggcgagagggctggcttgcctgggacgggggcatggggactgctgtgcggggattgcgggggtcacggggaaggagcaggggccagtgtaggaaaagaagccggggcgaggcaaggtggaggatatccggggtcaggggtcccagggacgctggagcgagccctcctgagtggtgggatgccaccgacaccttgcttctccctagcttctagtgctcggcgctcagaggtgagagttgggctgggaagtgttcagatttcaggaaacggtgaaaaataagtttttggaaatgagcgaatttgtcttccacaagcctcccttccctgcgcccatccccgaggaggagcgtcgtggtcaattttaaaaatacgaactcaagagcagagttgtgtgaggacacacacttcgaatcgtgatgcatctgcagtccgctcccgccccttcccaccccgcgcgttgggtgcaggagccgtctttattttctatttcat

SEQ ID NO: 43260 - DNA, 650 bp, Artificial sequence
  human replication origin
aaaaggatacccgaaggtcgtatggctctttgtattcgtgtgtgtgcaaaaaggaggactcgcggagcccgagccggcaagccccgcccctccccggacgccctcccggattggccgtccgcggccgcggggcgccccgcccgcaagcacacgcgccgcgcccgaggcgccaaccccggagttgggggcggggggggccctgagggccgccggacccccgacccccaacctcgcctggaccttggcagacccctttcccacctctctccctttcactttctcaccgtcctgtcaccctttcccatctttttttctcagtgaaacaaggcccagtcaccagcataacaatccagtgagcgacctccggacactttgttaaattgagtgaactagtcagtaacattctagactgcaattaaacatcagggacttggtgcgtgggccctactccggtttccaggtgaaatgtctctgggtcacgtgtgttgcttaacacccccacgtttaaatgaacattcacgtatggaacatctttctgaagtcttacacttcagcccgagctcccagtttatctacctggctcagaccacattctcaaaactaaagtggctcctctttatttccaggaagacagctggtatacctggatt

SEQ ID NO: 43261 - DNA, 1100 bp, Artificial sequence
  human replication origin
gggccgctccgcctcgcttagacattggccggctggcagccacctcggccccacggtccccgccgccgctgcagccagcttcccgtctccatgacaatagcgcgatcgagaccccgcccctccccgcccctctggcgccgagactcggaggaaagcggggttacgtcaccagggggcggagcccagggaggccagcgcccaatcataggtgaaggaggtgtcaggcactgggctgggcggacccaggggctctcggagaatgtagtctgaaccgctcaggcctcttggtgggcggtgtctgggggaggggagcagacggaggggaggagccaacgcgcgtgcacgagagcgcagcaccgagcgggtgccggtgcggcgctgggttagtgtgagatcgcgaaataaagtacatctcgcccgtcaaagtcaatgcgagaaactttgtatatagttatgcttcggcttgcgtgtggccccattatgcgaagttcccgatatcccgagcttccgcggcgtgcccaaacctgtgccatcttctgtcctggttcaccagcgcccctgtctgtcccagagttcgagtgcgtccgtggcttgtggtggcgggaggtggagagaagaggagagggtctgttttgtattctaactgtgtggccgtcgtgggcaagggctctgcctctgactcagttgtgtgtgtttgcttcgccagcgcctcgctgaacaaacagtggttgggttgggcactgctctgcccagtgtttgcagtggagcgtgggcggatgcgagagtgcgtgcgaaggggaaggcgacttagttaaacaaaagggaaggggacccgcaccctccaccaccaccgacttggcggtgcgagctgcgtgcggtgggaaaaccgggagaaagaggctgcgaggcgtgggagtggagctggggacggtcccgagatctcctcgggtgtagctgattctctgtctggcagttcttgcccaccacccctactctagaaaaaggctaccccggtagttccaggaaccagtgtcttctccctcgccgtccggcggggggtcggtagaaggaaggcgaggcggagacgtgcagacgtctga

SEQ ID NO: 43262 - DNA, 730 bp, Artificial sequence
  human replication origin
tgcagtctgcatctaccccgcctgctttcccctaccccaccccagcccaccccacccccttccatccaccgcagtgatcttgaagggagctgcagaggccctaaagaaacagagataacggctgtaggcagaggccacgttatccaaacctcaccagcccggtctgacccgccgagtcgccaacctccttcctaaggccctagttccaaacaggcctggctgggggcctcccgcttcccagggccgcatccgcccaccacaggcccacaaagcccccacaaatgccaggactccgcggcttcaacttccctccgaaccaattccagtccgattttatgggatcagggtgtgacccccaactgcagaaggcaatgaagagactgcggcgagccattcccagctcgcttacacaataaagggatcccgaggcgagtgctgaccctccccccggccgtcctgctgcagcgcgccccgccacatttcccgcctcgccccctcaaaccgcctgggcctcgcagggcgtccacccccggcctaggcgctccacggagggcgcggcaggacgccctcctcccgcgctccttccccggcgccggcggagtccgaccctccccacgcccgcggccggctccggagcccctcacccgccgcgcgcttccccggccgcgcagagccaatgccctcctgtccctccacccacgggtcgggcgcgcgccgcccgccttccaag

SEQ ID NO: 43263 - DNA, 1000 bp, Artificial sequence
  human replication origin
cctaacccacccagcaacccacgcaggggcccttcctgcccagcgcccccccaccctaccgccgggactgcgctttccagccccgcttagaatcccctctcttcctgggaggcagacactggctcgcggggcacgccgagacctccgccgggacactagcccctcgacctcgcgcccccagggatcccacccaccgagaacctggtcctcacgtccccacccccagatctccatcccccagccccccaggggtcgccctcctgcacacccaggccctgacccccgcgggtttcacaaggacttcattccccgctcctccgggagtctctccatctccacccactgaggtcccagtgcccccagcccaggaccctgctcaaactaacctaaggtccccgcagcacaaaccctacagctcagaagcccctctgtcttccccagctcccgcttcggtcccccgttcctgtcctccagagccgcccgggacccctcagcccaggagccattcctccctccacaaactgtcccccagccctgggccgtgcactcggacccgggtagccgcacctctcaccttcagccgaagatggtggcgcgggcgcacgtccccagccgcgaccacagatccagcgcctcagtcccaaacccaccgctgcctccgccgggctcctttagcactgctgctcggggctgccccacccacccctaccctcattgggccagctccacgcccatcaccgccgcccccagacccactggttggtttgcgcgcccatctccaagggaagacgttagcaacccgaacgaagctaccttcccgagtccggctccctccacccacctggaatgacgctcattggctcccgctcccagcccaggccacagaggccccaatctcatgggctggctcttacgcccgtcataggctccgggaggtgcggccggggcagtggcgcgggattggctggctcgtgcgtagatggacagctgaggctggctg

SEQ ID NO: 43264 - DNA, 1400 bp, Artificial sequence
  human replication origin
atcgcagagcctttccgagagaaggggcccaaagcgagtcaacttctctactgagcttcccatgaggatgctggatccccaatcctaaccatgcagacgtctgagggtcgccgccattaacgggaatgatatggcccttcctcccccactccctcctctcttctcccctttcaacacttgaattgggctctccgctacttccgcacagcgcaggacccacacgagcccagaaccatcacggcctgctagttcccacccctcccgtcctggaggaccgtaggtggacgctcttgcagagcgcctctcgctggttggggcgggggtgggcggagccagcaccgtctgggctgtggaagcggagggggtggggacactctggcccggttctcggtggtgcgggagcgggcgggagcagcggccgctctggtcggcggacgtgctgccgagtagtcccggaagcgaagcagcgatggcggagagtccgactgaggaggcggcaacggcgggcgccggggcggcgggccccggggcgagcagcgttgctggtgttgttggcgttagcggcagcggcggcgggttcgggccgcctttcctgccggatgtgtgggcggcggcggcggcagcgggcggggccgggggcccggggagcggcctggctccgctgcccgggctcccgccctcagccgctgcccacggggccgcgctgcttagccactgggaccccacgctcagctccgactgggacggcgagcgcaccgcgccgcagtgtctactccggatcaagcggtgagccggggtttttcctcccccagccccgagctccggggctcgaccttccccgccccccaccctctcccactacaactcaccccccacccactgcgctgccctcgcggcggcccacctccacggcccaaatcttgccagctccgggcgtcgggatccaactcccttctccccccaccctcagacccgcaagcaccaacccccgcctcgtgtgcccagatccgaccccgcccctcgacaacctcccgtgagccctccgtctccattccggccaccctcccccacacctcccacctccgggtggaaacccgaccctttagcgcttcagtaacgccccctcccgccttcggcgccgcccctatttccccttccccaccccaaccttgctagatgctgcccgcaggccccacccatcggtcccctctcttctcctctggagccccgttcctaacacagacgaactcagcttcctttgccatgcctctgactcgagccaacctttctttttatcctccgtttttctcagattccctccacacagtcttttcccaggtctagatcgcttccctcgccccaatctttccttgaaccccttttccagtgtcccaaagctg

SEQ ID NO: 43265 - DNA, 1170 bp, Artificial sequence
  human replication origin
cggccggccgggcgcgcgcggcggagggagggagccgggaggcagcggaggagcgaccgccgccatattagggaccgcggagcccgggatcccgtcagcggcggccgcggccgggcctgcgggagctgcggaggccggaggcgggcgctgtgcggtgccaggagaggcggggtcggcgggagccagcgagccacgggagcgagccaggtgaggcggccggggtcggggacccgccccccgggccctaggcggcggagcttgactgcgaccccccaaaaccgggacggcggggcgggctgcgacccccaccccagctcaggcccctccaggagcccccagtcccctcgaatgccgcctcccaggccgaactaggcccgggtgacctcagcatccgcgtctcccgagttaacacccaaatcccagcgtcccccccacgtcggggcctgccgtgacccccaccccgagccacctgtaagtcgtgacctccccgcagccgccgtcagcgtccaccattctttttaaaataggctgagccctgcacccccaaccaggggaccccactgcgcacccctagaacagcagaccccgcctcctaacccgggtgatttctccctggcctgtcatccccgggacttcccagttcagaccctcccagcttgggtcctgcccacacgaagccgccccccatcgctgagcctgtggtgtgcgatggctcgcccaggccgcaaccagcccctcgccccagtaaaatgcagtcccagcccgggacacccggaaacctgtgtctgtggtcactgttgtgtccaccagtccccgcaggcacgggttgagtgcatggatgtccccgtctcacctcatctcgctgatttctgctcccccaccctcccagcgtgccccctaccagcccccattcccccgaaatccagctctcccaccaaagcctcagacgagctatccgtgcacaagcccctccctcctccgaactgaacctccgtcctgcgtcctgccccgtgtcttctccaaacgcaagcctggccatctcggatccccagaatatggagtgtgccccccattcagagccgttttacccctactcaaacctgtgacaccccctccccctcttccaccgtccagacctgtctccaccccacgtcctgagacccccgatat

SEQ ID NO: 43266 - DNA, 1050 bp, Artificial sequence
  human replication origin
ggactcgctccccgctgccccacgcgcggcccctcccacggtaccgccccgcgcttccgcttccggtctggggagaggtgcgctgcacgtccccttccggctcgcgcgggcagcctcgcagagtcgagcgtgttgggggttcggcgcttaggcgacaggcgcggcgggcgggagcggcggccgcgaaccccagccttgggcagaggtgttctagtttgcttagtgggcacaaagttgggccctggcctggggcagtagcgggggtaaggttggccctgggggcggggccaggctgtgagccgcacgaggcctgggggcggggctggttgtgggcggagatcagttccggggcggggctgaaggcggggaaccggctgaggccgtaccaggcctggagggcgaggctgattgggcagagaccagttccagggtcggggctgtgggtggggcccagttctcggggcggatggtataaggcttctagagcggggatgactgagcagagaccagttacaggggtggagacctccatttccggggcggggctgagcgggaaccaggctgtggttgtgacagccctggaggttggggctggctgtgggcggagataagctccgggccgggcggagggcggggactaggctgtgggtgtaccggtcttggagggcagtggtgattggcagagagcagttctaggggcggagctatggggtggcagcaagcctgggggcggggctgactgtgggcggagaccagttctgggggcgggactgtgggctgcaccaggcctggggagggggcagtgggtggagaccagttccaggggcagggatctgggtatgaataaaagggtgtatgatgtgggtgggttgggataggcccaggagccaggattgtgggagatcagattcaggggtagggccttccttggatccctagattgttgatacagttactgccccatgttcatacaacccaataggatcagattatgtatgcacatttgtctataacttgctttcccaaggcagaacatagtgatttaacact

SEQ ID NO: 43267 - DNA, 1220 bp, Artificial sequence
  human replication origin
cgcttcccctgggaaggggcctccggcatccccgcgcgcagcctagacctccagtcgcgtccacggcgccggccccaccctgcaggatcggccggatcctcgcaggcccgcgacccccgaggcccccggagcagacacatccttctcgcagaggccactcacctgctccgccgccgccgccgccgccgccgccgccgccgctgcctccgcctccccgtgcgcacccggctcggccctccgcaaactccagaccgggcctctcccgcagcggcgcctggggggcggggccgacgcccgcggccggccaatcagcggctgcctctcggtgctcgcagccaatccgcgtcttccgcttcgggtggacccgacggaaacattccagagggatccctccgcctcgcccggctcttcccgactcctcccctcgccgcgaagcagtggaccgttccgccccgcctaagccgcggctggctgtaccaccggagggctgaggaggggggggagctgcagctgggccccggccaatcgcgagggaggaaggagacaagcggccaatgggaaggaagctggggcccctgaaccacgtgctgtcggctgagtgtcagtctcgggtgccctgggtggtgaggggcgggggagtcaggtgacctaggccaggtttcggggaaaggattcgaacttccgacgtccaggaaagcggacagtttaggagacctgggtgggggtcaatggcagtccccaacccagttccctgcccggcctcctctgccccagcctggccatcctcggagcggataaaaagatgcattcaatctctgggggcgggcgggggatcgagatgaatagggagggtcccgagtttccctgcttcctgggctgtacaatggacaaaggcattcattcattcattcgttcactcactcatcaaatatttaatgtgccagactgctccgtgccagactctgtcctacctctgaagacgcgtcagtgaataagctgaatgtgctcctggtagaggtaacagagcgtgcaaaagccggacagagagatacagcacgctttaggatactgcaatatcgtgggagctagtaaatcagtgtggaaaggcaagatgcaatgaaagacaagggtgagatagtttatctgcttgttggtttgtttatgtgctaggtcacagaaggtacccagccagcctttcatagatctgtctcctccatctg

SEQ ID NO: 43268 - DNA, 930 bp, Artificial sequence
  human replication origin
tcgacagaccccccaccctgaaccttgcccgcgcccccacagaacctgggggtggggaagatgtccctgggtcccgggcccactaccccctcggtgggtcttggggcgcgacagttaatgggaggtcctgagccctggccttatggaatttcacgcaggtatttgcctaatacttacaaaaacagaaacagacttttaaaaagcggttgtaggagagaaaggagacagggcgtcctgtctgggccgccctgcaacaacagccccgtcccctgccgcgcctcctccgcactgaccacacccaccccaaccccacccccaccgcactgaccgctcctatcctcaaccccgccccctccgcggtgaccacacctaccctcaaccccgccccctccgtcctgaccactcttaaccccgccccctccgcactgaccacacccaccacaaatcccgcccctcagcgctgaccgcacccaccctcgaccccgccccccgcactgaccacacccaccgcaacctcatcccctcagcactaaccacatccactctcaaccccgtccccttcgcactgaccacacccaccccgttcggccccgccccccgcactgaacacacccgccctcaaccccgcaccctccgcactcacctccccctcgccgctcgaccccgccctcaccacactgaccaccctcaacccattgcgcccagtccccaccacagtgaccacaccctcactggctcggccctgcccccagtatactgaccattccccagccacttcccttccgcacttaccactcccccagccacgcccctccccgctgaccgctcctccagccccgcctcccccgtacaggcagagcgcccgcccacctctatgctgcgttctcctgactttacgttggcccctcctctgccaagcccccaggggag

SEQ ID NO: 43269 - DNA, 690 bp, Artificial sequence
  human replication origin
aggccgtggacggcaagtgagtccgaggcctgggggtgggggggcgggtccgcacgtggatgtgggtgtagacctcgctggtagacggcaagtgattcagatgggggcgggcgtggtgtccaaacagatgtagacctcgtcagtgggcgtcctgaaggggaagtgaatgggaccctggggaaggggcagatcctcacagttgtagaccatggaaggcaagtgagtcctgacccaggggaatgggtaggtttgcatgctgccagtgtagactggtggggactgtggaggggtaagtcagtcagaccccaggagaggaggagagcaggtttgcccgcgagtgtataccatgtgcaggtgagtgaggccccatgtgcccggaaggggtgccagtgctacaagaggtggaccagctgctcaacgccgcagggggtggtggaatggccggggatggcagaatggcaggcagggtgaaccttcttcgtgaccctctcctcctcctctccagagccatgaacaccagccaggtggaggcgctggggatccagatgctgcctggctaccgggacccctaccacggccggcccctcaccaagggtgagctgggctgcttcctgagccactacaacatctggaaggaggtgtgtcctgagtgatgggcggggccagagttatgactctagatctcatcgg

SEQ ID NO: 43270 - DNA, 910 bp, Artificial sequence
  human replication origin
caccgagtggccactggccagagacgtggatgacaggcgccgtttgcgggccccactacagttgttggggatgctgaaggcacagcgcttgtggtagttcagcccgcagcctgcagggggcgccagagagtaagagacatggcgtctgcccctcctaggtctcttcttgagaagttgtgccctttccacccaatctctcacctggtcctgtcccatcaccccccgccagcacgatctcctccaaaaggcactactatccgtaagtgtatcagccccttcaggcccacccctccttagagttctgccccaagttccagcttgtagccccaccatcaccccatctgtcccccagaccctgaacacacccacaccccttttctcactccaacaagggacacctcaaaggctccccccaaagctctgtccccagtttcagcttgtagccctgccatcaccccatctgtcccccagaccctgaacacgcctcacacccaaaattttcccactccaacaagggatacctcaaaggttccctccaaagctccacccctagttccagcttgtagccccgacatcaccccatctgccccccaggccctgaacgcgcctcacaccccaccttttcccactgcaacaatggatgcctcaaaagtccccgccaaagctctgacccagccccagtcctctatggtaagcacctccttctagtcctccccaaaactcctgtccatctccctagagacacctgttcccccttctaaccctgaccttcctttttctgaggcccctttggttccccctctttccccaaccccaactttccaaaagaaaatgcctctcctcacccccacccctaaggtcactatccctccaggtctgctcaccccctgtaccccactttctcttttct

SEQ ID NO: 43271 - DNA, 1000 bp, Artificial sequence
  human replication origin
attcaaaaagacccttgtcaatattcagtatcaaaacagttgcactattgatttctctttctcctaattggccccaagagaccacatcaaaggagagtacagtttaagccattaagctgcaggatgtacacctaacagacctcgcagaaaccttaccagaaagtggggattggttagagaaaggaactttcaaagatcagcaaattgctagtgtcctctaacctaccacacagggcgaatcccttaggcccctgcggactcctgcccattccactggactccacaaacgctcctcaggatctactactccgcagaccccgctacacaccccacctcctccaaggcagtctgaaatgcctgcagaaggccctaaccccaattcggagccacttcaggccactccaagccaccaccagcaaccagcccccgtcccgcctaagccccaagcttggcccctgtaaaactcctgctcaatcaacaagccccacccaactctcaggcccgcccatctggccgcccccggccctgctctagctctgcctagagtccaacacgcaccgtccagtcccctcccagtcccctcccgcgggccccgcccccagccagcccgcgagtcccacaagccccgcccaggccccgccccacggaccccgcctctctggcaccgagtccccgccccagagccccgcccgccgctcaccttcgctgtccgcggccccgaaggcctcctgctccaggcgccgcgcctcctcgcggccgcgcaactcgaagcgccgcgcccagccgggccgcgcccgccacagctcctgcaccagcagcgggcgctcggagtcgcccagcacgcgcaggtgctccgcccgccactcgccgcttcccacgcccgccgccgcgggccggcccagagcgtcgcacaaagcgaaggcgtccacgcagctgctctcgccggggccaccgccggggctgcctgctaggccgtagcgctctagcgcctcggccacga

SEQ ID NO: 43272 - DNA, 1000 bp, Artificial sequence
  human replication origin
ccctccggcgtctctctcctccctgttgcttctctccctgagtttcattccctaaccccgattttcttccctctggcttccgccccccacagttatatttcacacaccccgccagtgccagctgcgaccccatagtctccccattgtgttatttctctgctcctctgggatctgtccgcgctctgagttcttccctagctccgggggatccattcctctatttgagttctgtctccaccccctgagatctgtcccgccccctaaattgtgatccgcaccccctggcatcctcacccgccctctgaatttgtctcctcccctaggatctgtcgctgacctgagttctgcccccgccctctgagttctctccccaccgttggagttgtgtccccttctcctaggatctgtccctggctctgttcccgccctctcagttctgtccttgccccctggaatctgttcctgccatctgagttctaccccttccccacaggatctatctctgccccctggaatctgtccccacccaccgagttctggcctccgtccctgggatctgtccccgccctctgtgttctacccctgccccatgggatctgtccccgcccacccagttctccccgccccctggatctctccctaccctcccagtcttgccccggccccatgggatctgtccccgccctccgacttctgaccctcgccactgggatctgtcctcgacctcccagtcctgcctccgcccccggaatctgaccccgcccaccgagctctggcctccgcccctgagatctgtccccgccctcccagtcttgcccctgccccatgggatctgtcccccgcccaccgcctccgcctctgggatctgtccctgccctcccagtcctgctcccacccccggaatctgtccccgcccaccgaactctgtctccacgccggaattccagcgccgccccgttgggtagagcccggcccttccctgtcctgggcccgcagacag

SEQ ID NO: 43273 - DNA, 1000 bp, Artificial sequence
  human replication origin
cagaacacccgatactcacgttcgccctcttggccgcttgcatcgccatcttggcgggctgatgaagttaccgtagcagatactgaaattcctccggagctcgctcggcttcgggggttacaccgcgttagatgcaggacatcaacatccaggacccgccggaagctgttacagcggaatagcgccgtcttacgctgagacgcgctgacgtagcagcccccttcgaatagactccggggtaaaaccgagcctgagcgagactcgaggccggaagatggaaaggcgagagtccaagacacttccgggctctgtaccgtaaagggcggggcgtagcctccaaaaggcgagatgttccggtcggggaggccctgagcagaggaacccgggtggagagggcggggcctgaggagggcggagagctggggcgggtctcaggtgagtaactggggagcggaggaggcggggcttgagcagggttatgacaggtagggcgggacccaggtgagtagcgggagggggcggggcctgaggagggtgcggagagctggggtggggcccaagtgagtatccgggagggagccgggcctgagcaaggcggtgagctggggcgggacccaagtgagtaatggaaggggcggggcctgaggagggtggtggcggtggggcggggcccagatgtgtagcgggaggtggtggggcctgaggagggtggcgagaggtggggtggggcccaggtgagtagcgggcgaaggcggggcctgaggaggactgagctggggcgggacccaggtgagtagcggaagggatcggggcctgaggagggtggtggaggtgcggcggggcccagaagtgtagcaggaggtggttggggctgaggaaagtggtggaggtggggcggggctcagatgtgtagcgggaggtggtggggcctgaggagggcggcgagaggtggggtggggcccaggtgagtagcgggcagggctggggcctgctgtggtgc

SEQ ID NO: 43274 - DNA, 960 bp, Artificial sequence
  human replication origin
tgcggcggcgcccccgctccccctcagccgcccacctcccgccgcgcgctcccccaacttcccgcccagcgcggctgacaccgcccagcccggcgcggggtccgagtcctgtcgccgccgccgccgcgtgcagttggggggttgggggtttgggggatgggggaggggccgccgccgcctcagcccgacgggccgggagaacaaagcggcggcggcggcggcgcgaactttttcggtgtctgttcagcgctccccgaggcgactacttacagtggcaggctcggcccgtcgtgagaaactgcgcccgccagcgtctgagtaccggacgaggcgccagcgaggcttcacgcgcctcgcaggatcccgcccgcctccggcgccccttcctccctccctccccgtcccgtcctggggccggagggcggggggccggggcgcgcggggggcgggggcgcgcggccagcgcggggcctgccgggagctgtagttcctcggcccgcgcccgccgggaggtggccgcggcgggaggtcggggttgtctctgccccgcgaaggggcgccgggagcgccgggtacagtcgggctggctccgcaccctcgagttccgggcgtcttcgtgagcgcgggggcacggggcaggggcgccgcgggagtcgcgagcgtgtctatcagttacacgcggtacttgatcgcgctgttgccgacggtactgtcttttcctctactgccgtgcactcttgagggaggcggtggcgacaatgggccagaggtgatagttggaacgggggacttgtaaggcgtccagagcagagagctgcttccaccctgagatgtcacagccctcccgcatgctcctccctgctgcctgcccccggggtggccgccggcaccgcagctcggcgcccaaaccggcacgtcccaagcccgacgttccggtgactgcaggggttttcccggtgc

SEQ ID NO: 43275 - DNA, 970 bp, Artificial sequence
  human replication origin
cgtgccgccgggggagggggcgccgctgcggggcgtgggagcccggagggcgcgggctgcggcctcttctagcagcccccgggcccggcaggtgcgcgcggggaggcaggcgccgggcgaggttgtctgggccctggtccgagggctgttcccgaccccgcctcggcccccaccctcagccggccgacttgcggagaggccggcgtccagtccctcacccagacaggcctctcccagagacactggcgcgctcggaggggatgcgctcaaagggtcccgcccaggcgggtcggcactcggcctcccacacagagaccctcggcttcacacctgcacccacagagaagctcaaacaggcacccacacctacacattcactctgcaacatgccccgcagacacccggacagatacacccacagacccaccccctcacagatgcggggacagacacgtccacggacacacgcagactcacgcagagacctgcaaacacactcagggaggtaggcaggacatccctggtgcccggcctccctcacggggagactctcagatgccacaaaaccccacgaagttcaggtaggcatacacagtctcatgcattcacacttaccaaagacaccccagaattcatacacacattcatacactcagatgaacacacaagcccagacccagcacacactctgtgtcgcctccccctgtgatcatctcagcactgtcaaacactctgactgacacggccagatgcacacaccttcaccctcagacacactagagtagcacacacacgccaagacacagccacacagactccatccctcccagtgtgggtgcatcccgacggattgactgacaccctcagactcaggtacactgagacacacttggcaggctcacactcacagactctcccattatcaccctcggcgacccgcagtcctcagacacacacgggctcagacact

SEQ ID NO: 43276 - DNA, 1000 bp, Artificial sequence
  human replication origin
gcaaggggtgggttgggtgcactatcaggggctacactgcccagggcggggcgggtggggggggcgtgctatcctgggcttcactgcccatggcggggggctggctggggacgctgtcataggttgcattggggtggtagggggcgggttcggtgtggtattgggggctgcattgccagcagtgtgggggggggggtggttgggggcactgtcaggagcttgcgctgtcaagctagtagcaggttaggtgtgctattgggggctgcactgcccgaggtaggggggcggattaggtgcgctattgggggctaaactgcccacagctggcggggtttgggggctctgttggggggttgcagtgtcagaggcgggttaggggcattatcagctgctgcactacccgtggcaggaatcaggttgggggcactatcgggtgctgcaatgcctgtggtggggacgggttgtgggcattatcgggtgctacactgctggcggtggagtggttgggggtgctatcggggtcacactgtcagcggcgggggacaggttaggggtgctatcggatgctacactgtggtggagggcagggggtggggtgttgagagcgctatttgaggactacattgctggcagcggggggcggattaggggcactctcagggctgcactgccggcagcaggcagcagaggtggcagtgacagcagtggtctccacggaaaggacagtccttccctccctggactccaggctttacaaagcgattttctcctgcttaagtacagaggacatacagtgtttccgcaggaatactgagcacggcagggccccccacatctgctgtggttccctgggttacaccctctcgctctgtgttgtggatactgcctgggacccccaggcaccgagtaacgtgcaccacgtgggggacggtgctctctgggtggaggctcaggaatgagagcccgcacttgggtggggagagctggctgggtctgactt

SEQ ID NO: 43277 - DNA, 980 bp, Artificial sequence
  human replication origin
tcccgaaataccctggcagcccccgcggccgcgccgttccagcccgcggcagcggcggcatccaaactccacaatattaccaccaccgcccgccgcgattggcggccgcgcgggggagaggccagagtaagccgagcgcccattggccacgccgccgcgctcgctggtgacccccccgcctaccgcgacgggaggggcatgcggaggaagccgcaagggtgggcgcggggccgcggctcgggcggggcgggggagtcggcaggggtgcgggccgggggagggcggccaggtgtcccggctcccaggcgctgccgcctcaggcgtggtaggcggagtccggggcggaggtggcgtggggaggtggggaacggcccgggactcgcacgtggaggtggagcgcggacgcctccctcagccagggcaagactaaggagctgggtgagggaccggaagggctggaaggggtgggcacctgggggctgcggcgagtggcgatgggcgagccggacttgcacgtggagaaagcgtgagaatgtgcccctgggtttggggagggtggggagccaaggagtgggatgagaggtggtcacggaatggggggcgctgctgtcctccccgggggctgcaggccgagaccgggtgaggggcgggggtgatgctggcactctggacggaagggcgtcgtcttcgcagccgaacaggttgtggacgcccaatcgtttttctgcccgtagtcccaatccgaagctaagctgtgtggttttcccttgaaagctccccagccaggcttgctgcctccacccctttcgcatctgaagcattttgcctcccactcgagagaaatcaattttcttaaacaaacaaaaaaaaagatgtgcaggatttctaataaatagcatccttggatggaggagaagaggaatgactccctcatcctgccacacacacccccacgccaccccgcagctctgaaacggctt

SEQ ID NO: 43278 - DNA, 1298 bp, Artificial sequence
  human replication origin
tcggcgctaggactccggggcggcggccgtgggaagggcggcgctaggaccccgcgggcccggcggcgcgtggggcggcgcgtgttgacagcggcggcggtggaaccgggcgggcggcgggagtcggcgcctcgggttcctacctcgcgtccctaggcggcggcggccgggcgtcccgggatggccttcatggagaagccgccagccggcaaggtgctgctggacgacacggtgccgctgacagcagccatcgaggcgagccagagcctgcagtcccacacggtgcgcggcccagcgggcgggcgggcggcgtggggcggccccgggccgcgagggggctgcgggctgcctggcgcgggccgggcagggtcgtcggacggagaccgggccacagggtgggcggccctggccgagaaggctgtggcgcgccgctgggtctgggtcagggcccctggggcccaggcgaacgctgaggcccggaggggccaaggatggggaccgcagctcccggcgccgcggggtggaaggagctcggcggcgaccaggaaagcgactccgagttggggggcgggggcgggggctgcgggattcccgggctcaccttggactaggggagcaggaacgagaccgctcaggaccatccacttctgcccgccgccagccttttcctttttgaggccgtgtaatttcctccttgcagctgagggtctgggtgatggggatgagggtgtgccgggccaaatgaagtgtgactccagagcctacttgttgggacagcagagtgtaagtggctggggtctgcagccccgtttccaggtcagccgcttggccctggtcccgggaagtggtgggggcggcagtcggggcgctgttaagcaggtgtatgaatgtgcttctctaacttgctctttagtgggcagtggtagcattcatttgagtttaaaatccactcgagtagcataaaggagtaataggtcctcatagtaaacattggcagggttcatttctgctacatatacggtcttttatggggctttaaaaccgtggttgttttcatttgcttgtacctttttttttttttgaaaggcccactatgcattataatttccaagcaataaatctaggaaccagcaagaaacctggagctatcagctagtgggacttttttggaaaagtaatgagtgaggagagagattccttcaattgtgatgttttgtcagtccaccgaatcagattcagactcagaggcttgtttgtttaccattgcagtgtgtttggggggtcatcatctggaggct

SEQ ID NO: 43279 - DNA, 1230 bp, Artificial sequence
  human replication origin
ggagagtgcagccgtgattggcgcgttcactcaggccaggggcgccccaggtctcaggtgctaggagcgcggtgacctaccaccctccgggcacgcgttctggccacgcctcgcggcccctttcattgaaagagcccgtagggatcacgtgaaagaacactgcagagtgcgtgacgtcacgacgctcacaccaatgggagcctctgtttatgtcgggagccatcaaatagtcatcttccccctaccatcccccgcccactctccgtcgcgctgcgctgcgtcgctttcagcctctggtgaagggcggcgcgcttaggcaggcggtggcgcggctggagtgccgcggggagggctgtgccggttgctttctgcagccgcatctcggccagctctcctcgccgtccccggggcgctgtgcgtctccagtccgggaccgaagccgcctgccgtagcgggcggccagatccgcgtcccgcctcagcggccggaggacatgcgggagagagaatgagccagagggacacgctggtgcatctgtttgccggagggtaaggtcctggcggggcgtgcgcactggggctgagggtgctggggccgaagacgcaggcgaggggggcgaggggggccgaggggggtgggggggtgggggggcgggagtgaggcctgggcggggagctgccacgggcctgcgggtgaggggagcgacccagcccgtgggtggtgaggggggctccggttcggggaagcaagggggtgaggcccgggcccgagggcgagagagtgaggcccgggcaaagagggttgaggcatgaaacccgggccgggagtgaggttttgggcccgcggggccggggtgaggcggaggccgaatccatgcgtctgaggagacgcgggcaagagctggggtcggcgcttgattacccggacgccgctggacctggccgcacgccgcaatctagcaggcgtcggggatccagggccgctttgaggagcctggcttcggatttcgcgtaggttgcatggcccaaggggacggggcggaaagtgcggaggctgaggacaaaatgggcgccggagactcctttagccctcgctccttgcagcgctcgcttgggcctctgcacgtcactcacgccccacctcggacctcgggccgctcatttccgggctcggctttgcaaggtgggtggtaagggggctacgggatcgagcggggaaggctttggtatt

SEQ ID NO: 43280 - DNA, 1100 bp, Artificial sequence
  human replication origin
ggcgcgcagcgggcccggttttatgaatgggagagcgagccgcggccgccacatcaggtagaggctgtaactggatctctagcgctgggccccattcacaaaacaagacacacttccacccaattctcagccttccccattcatgaaaactccttcagctgcgcccccgcccccatttccaacgcacgcccagcctccgacgcaggcccctcaccccagcgttttaggaagaaagctcaatgcttcattcacaaaaagggaagaaaaaaaaaaaagccgcagggagcagcgagccaacgaaagaaacccgcttcattcataaagtcacccacattcataaaaacgaggtgcggcgcccggcgctaccaaccgcttccaatccccccacccccaacatctctccctggcaccccctcgtcgaccaggagttcggttcccccccgagttttctccaccctctgaaaatgcggccggaaccctaatccgctgcgaggctgcagcatctttcggtgctgtcccctccacacccgtgttatccccaccatccccaggccgctgttccggtgcgccccgattttctcgagtcgccgcacagccggacgccctcagcctgctgggtgggagcagggcgactggatgtccactttccaccacctgaaacttgcaaggcctgcgtaagttcctggtcgacccccgcccccgcaggctgcacttgcctgtgtcatttaccccctcccggtgctctggggggcagcgcctctcagacattcccctcaaactgcttcccgccccctcctcccaactgcggagctccgccaagcgtctcttctcgcgagcctccaagtcccctcggggctctcgaatctccagagactgtgaaagcctcgcaactccgcgatcccccatccactcgggagcccccgcactcgcgctccggggcgcctcccccacgacgtgtggaaagccgctctccccgcgctccggaaccgttagccgcacccgcccgacgcctcccaggaaccaaaccggaccgggccgcggggggagggggcggtcaacccggggggggtcaccccagctactgcaccccgactttgaag

SEQ ID NO: 43281 - DNA, 1340 bp, Artificial sequence
  human replication origin
cactgcgccgccccccacccccacccccaccccaaataaaaacagagagacaatccttcaattataaagaagaccacggcgcccgggtctccggcaggggccgctgcagccgagcagaacgctgagccgctccgccccacggcctcctctccagccggcgcgcccgcctcccgcaggtgcgtctctgcctgcgccgggccggggtctccgcggcctctcccgctcgggctccggcttcgaggtcccgaccaagcactgctctcgcgggactgcgcgcaccgcccagggcctgccgcgggctcgcgagcggaggtggcaccggtccgcggtgcgcatgcgcggcccggcctctgccctgcggtcccgggctggtgactggctagcggttggaggaagggatgtgggggatggtgggtgggtacagagagctgggagggaggcaccccggggggcggggcgtgggagactgtattcgggggcgcgagctgccccaggtgagccgtggctcaggtccggagcgcggtcgggacacagcgcctctaggagaaagcctggaaggcgctccgggggtacccagagctcttagcgggccggcagcatgtgcggggcccaaggtcttccgggctctgcgtgggggtcgctgcggctggagaccagggagggggatggaaacggggttggaaagtaatcccacccgagcaggtgggcatgggaggccgctgtgctggggagccccgcgagggctccgaacagagcctcccttttcagaaaggtcaccctggtcattgcagctgccagggtgaccgaggaaggtggccggggtggaggcagtgggcgtggagaggggtcggattccggacgtagtttgaaggtggagccgtcaggttctgctgagcagcttggctatggggcgtgcgagaagggaaggctcagggcctagtccctgggcacgagtagtagccgggaggatgaagtcccagtgcttcggggggaggcggcttgaggacggctctggagctcaggcttgcccgcgtggagtggaagctgcctcttggacacagggcggggaggccgcatgcagtctggcgcgctgggaggatgggagatccagaggggcagggctggaggggtaggaggaaaacctgaagagggtggcgcccggaagcccgggaaagtgatgaactgggtcagaggccgggtatcaacaaataggagggtggagacgaccttgaggaaagcaggtgatggaacgggagggaatggggccccctagtggagacacctgggagtgatgtattgcatttatttagctcttaggcgttcaaaaattatttattggg

SEQ ID NO: 43282 - DNA, 1200 bp, Artificial sequence
  human replication origin
ttcaaatgatttgcatacattatgcaaataggtagaactgcccgaagaatgcctacgctgcgtggtgcggacgaaacgcttcccggggcctttggattggtctgtctagccacctcatttgcatgacgtaatataataactggaaggccccgcccctctggtgcatttccccgctccaaccacctcctcaaactcacggcaaagggatgcgagagctggaactcttaccaggcctgcggaaactcagccctccggcagctaatcccgcccgccagcccccgtcctctctctctttctccctagctgaaggcgccacgggccgtgtgtcgttgccttccacttttggcgtcccaacgtctctccgctcccatctttctactaacgtccgacgcacgctccgcctctttctcccacattcgtcgtgtaaattctgcgtcccaaccgcccagccgacctgcaccgcattcccgccccctcaacacggctcaacggccgacgctgggggcccgcctccttagccaatcggggtcctagtgcccttaagtccctcctctttatgcaaataacctccgcatgctccgcgcgcccggcccttttttttttttttttaaactaaagacagccctggaagtagagggttagggtagaaagtgccccgccctttatgcaaattaaggggcgtgtctaggcgcggagggaggtgggaggtgggagggggtgctcccgggggcggcggttgcccggatgggccgttagtcggggctcagccgcggagtgagcgagggagacgggaggagccgaacccggcgccatccgccgccatcctcccccgccccaccgccatcccgtcccggggagcccctaggcccgggtcccggatccccgcgcacccggccaggtgagtctgggtgaaccgtgcgctgacgcccttttccggcgcgggagaggtggtggcggtggcggtggcggcggcggcggcggtggtgggccggggggaggagaagctgccattagccgccgccattttgtcctcctgctgccgggcctgcttgcccctccccctccggtacctctactccgggacccgcacctccggcagttcattcaggatccgtagtctgcccctaaccacccaccgtcttggcttcagggggtgacccctgcgcctgggtccgtaactccctaccctccgctgcgctc

SEQ ID NO: 43283 - DNA, 1655 bp, Artificial sequence
  human replication origin
cccgcccctgtcattgacatcttggcccggctaggacaggaaccccccttgctgggggaagaggggaatgactttgtggcatggcctagaaaacaggcaagcaaaaggcaagataagaaagaaggcaagagtcagaaatttcccaccaaccccccaggctacccagcctctcacccagcaggatccggcccccacggaggtccccatctccctcaagattctcagattcatccccaatgagtggtgtagcccctacaggggtgtcagccccctcatcaccaacagtgacagtgacagaggctggagatgaggggccagcaggctccagggagtcgggggtggccttgggcagggtttcttcactacgaggggtgtcccccaaagagccatgaactgtagaggaagagaaaaagttcagagctaagggctcaggagatcctgtgtttagggaaggtgacggtccaattggggcccgttttagctgcactcacctctctcggtggctcctctggtttccttctccagcagcagcgcccccatctcagcgggggcctccccctgggaggggagacaagggacaggagggctggtcagcccagtagagagttggggggtccaggatgcctgggccctgggaagagagagtaggctccggggcctacctcttcctctgtggggccccccccttccgcggcctcggctgcccggaggggccgcacgacccctcccccgggcccgcatcaaccccctccctctcggtagaccccgcatctctggggccgagagaagaggagggggagggggcggggcctccgcgccccggccccgccccctcctcccggctgcacgcgccgctccccctttgtcccccaggccgcggggaccccgggcaccaacccctccagcacccgctgccccccagcccggtggacggcccctcgtgcccctcacgcgtgctcctggggccccggcgcccgtcgcccactcaggggcagccggcggctgcacgcgcgcctccgtgcccactccccccacctcccacaccctggtcccctcatccgcccccggtgctggccccctggattgctgcaagtcccgcccgggccccccggccccgttgcacccccggagcattgcacgggcgcgcgcttcccccgggcgcgcgcgcgggcatgcacccgcctctccccctccccttccgcacctcggcggccgccgccgctgcagctcccgccgccgccgccatcgccgcttgcgctgggggccgagccggcgcgcggccgccccgggtcacgtgggcgagggagggagggcgaggaggagccttaaaggagccgctacatgctttttggccattttcccctgagagcggcctcggagatggctgtgactgtcctaagctgggagctgcaagggagaattcctgtcattcctggcctcagttctgcagggaccgagggcgagacacgcctgggcccaggtgtggcgtctctgtccccatctggttttaggtaacaagcggagcttctgaacttctcggctctcggcagcggctgtatttcctctggcctggttgggcttttcccgcctctggttgcttttctgcctttctagtttttgggttaccagatagaaggcttggcctcagttttggc

SEQ ID NO: 43284 - DNA, 980 bp, Artificial sequence
  human replication origin
gcaaattactttagaactccataggtatcttgaggataactgaaccttttcctaacttaaatcatagactgccagacggaaaaaaaatgtcctcgatgtttttagtctcttactgcacaatgtcaagatatcagctgggttatacaatagttgccctctgcatactcacaaatgttaactccagtccttttttgtcttccctccccgcctaagaagctaccaggtcacatgctggcggatacgcagtggcggaaacctagcggtgacagggaaggacagccctctgcctactgatctgcaggtttctcctccagtttgctcttacaccggggtcctccgctcggaccttagcccattcatttgatgattctctcccagttcgttcttccactgggtcccttgctcagcactacccaaaataaccaccagctcagcgccggctgcaccgccgctcccccgcccccgcccccgcccccgcccccgcccggtggggctgcacctgccgaggccccggctcggctccgcgatcacggtcgcggcccccggggttcccgaggggcttctgcgcaccgaggcaggcgggactgagcggcactctgaacgggctcccctcttaatgtcccctcgcgcctgagcagctccggtcccgccggcgcagggtgcgggtacccgggccatgccggcccagagaccgccgcccccggtaccgctgcccactcgaagcccctggacgaccccgccgcttaccggcttcggcccgtggggcgcccggtagaagaggcgtgcggtccgtgctctcctcgccatcgttccgggccaggtctcgaaccggagacctcatgacgcctacgtgagcaggtgtactcgccacctggcagagaagggagcgccggcccgacagcccgaagcccccgggccgagctggctggaccgggcggggcgggggcgatgacaccgccccgcggccacgtctagtcccc

SEQ ID NO: 43285 - DNA, 1050 bp, Artificial sequence
  human replication origin
ggctgggcggccgggggcggccgggaacggcccctcggctacttaccgggaggaaggacagccgagatcccggggccccgggccggaccgcggagatgccccaaactgacacggccgccatcttggagacagtgagctccagccggggggaggggaggcaaggcggcggaacagccgcggggggaggggagcgtcgcgagggaacggcggcctgggggagggagctggaagagcctgggcgggcggcgaggggaggcggaggcccggcagcgcgggtggggggcggccgagagcgggaagagctgggccgagagccgggaaaggccggagggcggggcggggcagcagggaagagccggccggcggggtcacgtggggccggtacaaaaggccaaagccaggggaggaggaggacttggtggggctggaggctggggagcgggggttcctcctctcccgtctcacgcgtttaagtcagacggcgacccgggagaggaggagctggtgcaccccatgccaccgctggggaaactgagggcaggagtctgggtggggtggcttcagtgtggcacggaaatccggcagccacgcaggatgggaactctcggcggcgtctgtttacagttagtgagccctccctccccactcatttgcctgcacagcgactttccggagcccgagggcggggcctggggggcggagaggaggcggcttcccgtcctcacccctggcagctcgcctcagcccccgacggctctcctgtgtcggtgggaagagttggggagagggtggaaccagaagcacccgtcttaacccctttcagcagtgacttcatttcttccctcccccagcagctgagagggttcttggagctcactagagccattttatgggagactccacagacctgggtcgtgtgacttggacaaggtcacacagctagtatgtggcgcgcacctgagcctgggactgagatttgtcttattccaaagccggtcttcccttcttgccctgtgcggaactcttgtccatacttagggcgttggaacc

SEQ ID NO: 43286 - DNA, 950 bp, Artificial sequence
  human replication origin
tagaagcagactcctccccgctcctggggaaaaccctgcctaatatttataacgttatgacatactgtaatactcacaaggtggttgtagaagtataaacacgactggagttatctgattggctgctggtgatgtaacacccatgtcaatacttcccagtgaacgcacgtgttcgaccttttatttaaatttccatttcatcacagcaataagacactcggggcggtgcattttctgtgaaatgactactgtccggggcccgaggtgctgcctcgcacaatgcatcaaaggaggttgtgtccgtggtcgtaacctcttcgcgtgaaaggcaccgcctggtccagtctttgtgaaggaacaaaataagttcacttccttgggcaccgccacccaccctcagcaaatgacaaggctggagcgcagctcccaccgcacagttatttgcaaagtcccaggtgaactcgtggcgagagaaggaaaatgcgcgtcccgggcgcgggtaggtgcgtgtgggcagcggggaggcggccagaccctgacactcgccagctgtttgtcctccgcgtagcccggccccggccgcacacgcccgccccctccctgagacccccagcccgccgcccggccttttgtccccaacccctcggccgacttccttccccgcggccgcacccccgcccccaggccggaggcgcagcccagcccctttcccggtcccctggcgcccccaccccaccccagcccagccccaagcccagcccccctcccccagcccggcccccaccctttccccctccagcggttactgctaccccggtgcattgtgggcgcacggtccgttgttcatttgccattcgacctccgccagggcctggtcggacggaaacgctccgccggctttattgtcgcttcgttatgtggcggagccgagcagtttagcgtgcctctca

SEQ ID NO: 43287 - DNA, 970 bp, Artificial sequence
  human replication origin
ggagcgacggccaggcggggagtgaggaaactcctgccccagcacccacggagcccactccggtggtgcccgccccttgtcggccagagggggcggggccgcgggcgatggggcggagcgggctgtgttctggtccgctcccgtgacgcgctgcccgccaggctgcgggggtcgcggggcgtccgcgtgggccagcggaggcccacagctgcggagggaaaccactgggaggggagaaggagctctagggagagcgaggctgcaacgaggggagagccgggcgacgggcaggggcccaggcgcgctccccgacttcccacaggcgcgcgcatgcctgcgtgtcagggcgcgcgctccccctctcggaccgaggcgaccccagtccgtgagcggcttggatcctcgcccgttccctcctggtcgtttccgcagtaacctcttatcagagcgggcagctgtgagtggcgctcacatccgccgctgccctgtcgaatgggggaaagagttcttgtgttctgaggagggtttggctatggtccttgaccctattcttgtctcagacttgcctcccaggtatcgaggtctccctgtgggtttcatatggcttggtcctttaggagctggaaaaattaggcataaagtccccccacccccttgacagaacgccccttctgactccagaggtcctttatcgagtgccaggcattggtctaggggcatttgaaaaagattcactgaaggacatttttaagagttcgctttctcagagggcagcttctcaaactcattcgctggtttcttttcctctttccgcctgtttaaggttagtgttccccaggtcctcttgccgtcttccttttcagagtttcctgagccatctcatccaggcccaacagctttgatcctgccgtgccccccataagaagtgacccctaagtgaatgtctctgcccacacttcccagcttgtgg

SEQ ID NO: 43288 - DNA, 1860 bp, Artificial sequence
  human replication origin of c-myc gene
accgcatttccaataataaaaggggaaagaggacctggaaaggaattaaacgtccggtttgtccggggaggaaagagttaacggtttttttcacaagggtctctgctgactcccccggctcggtccacaagctctccacttgccccttttaggaagtccggtcccgcggttcgggtaccccctgcccctcccatattctcccgtctagcacctttgatttctcccaaacccggcagcccgagactgttgcaaaccggcgccacagggcgcaaaggggatttgtctcttctgaaacctggctgagaaattgggaactccgtgtgggaggcgtgggggtgggacggtggggtacagactggcagagagcaggcaacctccctctcgccctagcccagctctggaacaggcagacacatctcagggctaaacagacgcctcccgcacggggccccacggaagcctgagcaggcggggcaggaggggcggtatctgctgctttggcagcaaattgggggactcagtctgggtggaaggtatccaatccagatagctgtgcatacataatgcataatacatgactccccccaacaaatgcaatgggagtttattcataacgcgctctccaagtatacgtggcaatgcgttgctgggttattttaatcattctaggcatcgttttcctccttatgcctctatcattcctccctatctacactaacatcccacgctctgaacgcgcgcccattaatacccttctttcctccactctccctgggactcttgatcaaagcgcggccctttccccagccttagcgaggcgccctgcagcctggtacgcgcgtggcgtggcggtgggcgcgcagtgcgttctcggtgtggagggcagctgttccgcctgcgatgatttatactcacaggacaaggatgcggtttgtcaaacagtactgctacggaggagcagcagagaaagggagagggtttgagagggagcaaaagaaaatggtaggcgcgcgtagttaattcatgcggctctcttactctgtttacatcctagagctagagtgctcggctgcccggctgagtctcctccccaccttccccaccctccccaccctccccataagcgcccctcccgggttcccaaagcagagggcgtgggggaaaagaaaaaagatcctctctcgctaatctccgcccaccggccctttataatgcgagggtctggacggctgaggacccccgagctgtgctgctcgcggccgccaccgccgggccccggccgtccctggctcccctcctgcctcgagaagggcagggcttctcagaggcttggcgggaaaaagaacggagggagggatcgcgctgagtataaaagccggttttcggggctttatctaactcgctgtagtaattccagcgagaggcagagggagcgagcgggcggccggctagggtggaagagccgggcgagcagagctgcgctgcgggcgtcctgggaagggagatccggagcgaatagggggcttcgcctctggcccagccctcccgctgatcccccagccagcggtccgcaacccttgccgcatccacgaaactttgcccatagcagcgggcgggcactttgcactggaacttacaacacccgagcaaggacgcgactctcccgacgcggggaggctattctgcccatttggggacacttccccgccgctgccaggacccgcttctctgaaaggctctccttgcagctgcttagacgctggatttttttcgggtagtggaaaaccaggtaagcaccgaagtccacttgccttttaatttatttttttatcactttaatgctgagatgagtcgaatgcc

SEQ ID NO: 43289 - DNA, 4429 bp, ARTIFICIAL SEQUENCE
  empty vector
tagttattaatagtaatcaattacggggtcattagttcatagcccatatatggagttccgcgttacataacttacggtaaatggcccgcctggctgaccgcccaacgacccccgcccattgacgtcaataatgacgtatgttcccatagtaacgccaatagggactttccattgacgtcaatgggtggagtatttacggtaaactgcccacttggcagtacatcaagtgtatcatatgccaagtacgccccctattgacgtcaatgacggtaaatggcccgcctggcattatgcccagtacatgaccttatgggactttcctacttggcagtacatctacgtattagtcatcgctattaccatggtgatgcggttttggcagtacatcaatgggcgtggatagcggtttgactcacggggatttccaagtctccaccccattgacgtcaatgggagtttgttttggcaccaaaatcaacgggactttccaaaatgtcgtaacaactccgccccattgacgcaaatgggcggtaggcgtgtacggtgggaggtctatataagcagagctggtttagtgaaccgtcagatccgctagagcatgaccgagtacaagcccacggtgcgcctcgccacccgcgacgacgtcccccgggccgtacgcaccctcgccgccgcgttcgccgactaccccgccacgcgccacaccgtcgacccggaccgccacatcgagcgggtcaccgagctgcaagaactcttcctcacgcgcgtcgggctcgacatcggcaaggtgtgggtcgcggacgacggcgccgcggtggcggtctggaccacgccggagagcgtcgaagcgggggcggtgttcgccgagatcggcccgcgcatggccgagttgagcggttcccggctggccgcgcagcaacagatggaaggcctcctggcgccgcaccggcccaaggagcccgcgtggttcctggccaccgtcggcgtctcgcccgaccaccagggcaagggtctgggcagcgccgtcgtgctccccggagtggaggcggccgagcgcgccggggtgcccgccttcctggagacctccgcgccccgcaacctccccttctacgagcggctcggcttcaccgtcaccgccgacgtcgaggtgcccgaaggaccgcgcacctggtgcatgacccgcaagcccggtgcctagctgattggtctaaaatgagatacatcaacgctcctccatgttttttgttttctttttaaatgaaaaactttattttttaagaggagtttcaggttcatagcaaaattgagaggaaggtacattcaagctgaggaagttttcctctattcctagtttactgagagattgcatcatgaatgggtgttaaattttgtcaaatgctttttctgtgtctatcaatatgaccatgtgattttcttctttaacctgttgatgggacaaattacgttaattgattttcaaacgttgaaccacccttacatatctggaataaattctacttggttgtggtgtatattttttgatacattcttggattctttttgctaatattttgttgaaaatgtttgtatctttgttcatgagagatattggtctgttgttttcttttcttgtaatgtcattttctagttccggtattaaggtaatgctggcctagttgaatgatttaggaagtattccctctgcttctgtcttctgaaagagattgtagaaagttgatacaatttttttttctttaaatatttgatagaattctgcagtgaattctgcagtcgacggtaccgcgggcccgggatccaccggatctagataactgatcataatcagccataccacatttgtagaggttttacttgctttaaaaaacctcccacacctccccctgaacctgaaacataaaatgaatgcaattgttgttgttaacttgtttattgcagcttataatggttacaaataaagcaatagcatcacaaatttcacaaataaagcatttttttcactgcattctagttgtggtttgtccaaactcatcaatgtatcttaacgcgtaaattgtaagcgttaatattttgttaaaattcgcgttaaatttttgttaaatcagctcattttttaaccaataggccgaaatcggcgcggaacccctatttgtttatttttctaaatacattcaaatatgtatccgctcatgagacaataaccctgataaatgcttcaataatattgaaaaaggaagagtcaggatgaggatcgtttcgcatgattgaacaagatggattgcacgcaggttctccggccgcttgggtggagaggctattcggctatgactgggcacaacagacaatcggctgctctgatgccgccgtgttccggctgtcagcgcaggggcgcccggttctttttgtcaagaccgacctgtccggtgccctgaatgaactgcaagacgaggcagcgcggctatcgtggctggccacgacgggcgttccttgcgcagctgtgctcgacgttgtcactgaagcgggaagggactggctgctattgggcgaagtgccggggcaggatctcctgtcatctcaccttgctcctgccgagaaagtatccatcatggctgatgcaatgcggcggctgcatacgcttgatccggctacctgcccattcgaccaccaagcgaaacatcgcatcgagcgagcacgtactcggatggaagccggtcttgtcgatcaggatgatctggacgaagagcatcaggggctcgcgccagccgaactgttcgccaggctcaaggcgagcatgcccgacggcgaggatctcgtcgtgacccatggcgatgcctgcttgccgaatatcatggtggaaaatggccgcttttctggattcatcgactgtggccggctgggtgtggcggaccgctatcaggacatagcgttggctacccgtgatattgctgaagagcttggcggcgaatgggctgaccgcttcctcgtgctttacggtatcgccgctcccgattcgcagcgcatcgccttctatcgccttcttgacgagttcttctgagcgggactctggggttcgaaatgaccgaccaagcgacgcccaacctgccatcacgagatttcgattccaccgccgccttctatgaaaggttgggcttcggaatcgttttccgggacgccggctggatgatcctccagcgcggggatctcatgctggagttcttcgcccaccctagggggaggctaactgaaacacggaaggagacaataccggaaggaacccgcgctatgacggcaataaaaagacagaataaaacgcacggtgttgggtcgtttgttcataaacgcggggttcggtcccagggctggcactctgtcgataccccaccgagaccccattggggccaatacgcccgcgtttcttccttttccccaccccaccccccaagttcgggtgaaggcccagggctcgcagccaacgtcggggcggcaggccctgccatagcctcaggttactcatatatactttagattgatttaaaacttcatttttaatttaaaaggatctaggtgaagatcctttttgataatctcatgaccaaaatcccttaacgtgagttttcgttccactgagcgtcagaccccgtagaaaagatcaaaggatcttcttgagatcctttttttctgcgcgtaatctgctgcttgcaaacaaaaaaaccaccgctaccagcggtggtttgtttgccggatcaagagctaccaactctttttccgaaggtaactggcttcagcagagcgcagataccaaatactgtccttctagtgtagccgtagttaggccaccacttcaagaactctgtagcaccgcctacatacctcgctctgctaatcctgttaccagtggctgctgccagtggcgataagtcgtgtcttaccgggttggactcaagacgatagttaccggataaggcgcagcggtcgggctgaacggggggttcgtgcacacagcccagcttggagcgaacgacctacaccgaactgagatacctacagcgtgagctatgagaaagcgccacgcttcccgaagggagaaaggcggacaggtatccggtaagcggcagggtcggaacaggagagcgcacgagggagcttccagggggaaacgcctggtatctttatagtcctgtcgggtttcgccacctctgacttgagcgtcgatttttgtgatgctcgtcaggggggcggagcctatggaaaaacgccagcaacgcggcctttttacggttcctggccttttgctggccttttgctcacatgttctttcctgcgttatcccctgattctgctagcttaagcggccgcgatatctcgagagctcaagcttactagtgtggataaccgtattaccgccatgcat

SEQ ID NO: 43290 - DNA, 5532 bp, ARTIFICIAL SEQUENCE
  vector containing human replication origin
tagttattaatagtaatcaattacggggtcattagttcatagcccatatatggagttccgcgttacataacttacggtaaatggcccgcctggctgaccgcccaacgacccccgcccattgacgtcaataatgacgtatgttcccatagtaacgccaatagggactttccattgacgtcaatgggtggagtatttacggtaaactgcccacttggcagtacatcaagtgtatcatatgccaagtacgccccctattgacgtcaatgacggtaaatggcccgcctggcattatgcccagtacatgaccttatgggactttcctacttggcagtacatctacgtattagtcatcgctattaccatggtgatgcggttttggcagtacatcaatgggcgtggatagcggtttgactcacggggatttccaagtctccaccccattgacgtcaatgggagtttgttttggcaccaaaatcaacgggactttccaaaatgtcgtaacaactccgccccattgacgcaaatgggcggtaggcgtgtacggtgggaggtctatataagcagagctggtttagtgaaccgtcagatccgctagagcatgaccgagtacaagcccacggtgcgcctcgccacccgcgacgacgtcccccgggccgtacgcaccctcgccgccgcgttcgccgactaccccgccacgcgccacaccgtcgacccggaccgccacatcgagcgggtcaccgagctgcaagaactcttcctcacgcgcgtcgggctcgacatcggcaaggtgtgggtcgcggacgacggcgccgcggtggcggtctggaccacgccggagagcgtcgaagcgggggcggtgttcgccgagatcggcccgcgcatggccgagttgagcggttcccggctggccgcgcagcaacagatggaaggcctcctggcgccgcaccggcccaaggagcccgcgtggttcctggccaccgtcggcgtctcgcccgaccaccagggcaagggtctgggcagcgccgtcgtgctccccggagtggaggcggccgagcgcgccggggtgcccgccttcctggagacctccgcgccccgcaacctccccttctacgagcggctcggcttcaccgtcaccgccgacgtcgaggtgcccgaaggaccgcgcacctggtgcatgacccgcaagcccggtgcctagctgattggtctaaaatgagatacatcaacgctcctccatgttttttgttttctttttaaatgaaaaactttattttttaagaggagtttcaggttcatagcaaaattgagaggaaggtacattcaagctgaggaagttttcctctattcctagtttactgagagattgcatcatgaatgggtgttaaattttgtcaaatgctttttctgtgtctatcaatatgaccatgtgattttcttctttaacctgttgatgggacaaattacgttaattgattttcaaacgttgaaccacccttacatatctggaataaattctacttggttgtggtgtatattttttgatacattcttggattctttttgctaatattttgttgaaaatgtttgtatctttgttcatgagagatattggtctgttgttttcttttcttgtaatgtcattttctagttccggtattaaggtaatgctggcctagttgaatgatttaggaagtattccctctgcttctgtcttctgaaagagattgtagaaagttgatacaatttttttttctttaaatatttgatagaattctgcagtgaattctgcagtcgacggtaccgcgggcccgggatccaccggatctagataactgatcataatcagccataccacatttgtagaggttttacttgctttaaaaaacctcccacacctccccctgaacctgaaacataaaatgaatgcaattgttgttgttaacttgtttattgcagcttataatggttacaaataaagcaatagcatcacaaatttcacaaataaagcatttttttcactgcattctagttgtggtttgtccaaactcatcaatgtatcttaacgcgtaaattgtaagcgttaatattttgttaaaattcgcgttaaatttttgttaaatcagctcattttttaaccaataggccgaaatcggcgcggaacccctatttgtttatttttctaaatacattcaaatatgtatccgctcatgagacaataaccctgataaatgcttcaataatattgaaaaaggaagagtcaggatgaggatcgtttcgcatgattgaacaagatggattgcacgcaggttctccggccgcttgggtggagaggctattcggctatgactgggcacaacagacaatcggctgctctgatgccgccgtgttccggctgtcagcgcaggggcgcccggttctttttgtcaagaccgacctgtccggtgccctgaatgaactgcaagacgaggcagcgcggctatcgtggctggccacgacgggcgttccttgcgcagctgtgctcgacgttgtcactgaagcgggaagggactggctgctattgggcgaagtgccggggcaggatctcctgtcatctcaccttgctcctgccgagaaagtatccatcatggctgatgcaatgcggcggctgcatacgcttgatccggctacctgcccattcgaccaccaagcgaaacatcgcatcgagcgagcacgtactcggatggaagccggtcttgtcgatcaggatgatctggacgaagagcatcaggggctcgcgccagccgaactgttcgccaggctcaaggcgagcatgcccgacggcgaggatctcgtcgtgacccatggcgatgcctgcttgccgaatatcatggtggaaaatggccgcttttctggattcatcgactgtggccggctgggtgtggcggaccgctatcaggacatagcgttggctacccgtgatattgctgaagagcttggcggcgaatgggctgaccgcttcctcgtgctttacggtatcgccgctcccgattcgcagcgcatcgccttctatcgccttcttgacgagttcttctgagcgggactctggggttcgaaatgaccgaccaagcgacgcccaacctgccatcacgagatttcgattccaccgccgccttctatgaaaggttgggcttcggaatcgttttccgggacgccggctggatgatcctccagcgcggggatctcatgctggagttcttcgcccaccctagggggaggctaactgaaacacggaaggagacaataccggaaggaacccgcgctatgacggcaataaaaagacagaataaaacgcacggtgttgggtcgtttgttcataaacgcggggttcggtcccagggctggcactctgtcgataccccaccgagaccccattggggccaatacgcccgcgtttcttccttttccccaccccaccccccaagttcgggtgaaggcccagggctcgcagccaacgtcggggcggcaggccctgccatagcctcaggttactcatatatactttagattgatttaaaacttcatttttaatttaaaaggatctaggtgaagatcctttttgataatctcatgaccaaaatcccttaacgtgagttttcgttccactgagcgtcagaccccgtagaaaagatcaaaggatcttcttgagatcctttttttctgcgcgtaatctgctgcttgcaaacaaaaaaaccaccgctaccagcggtggtttgtttgccggatcaagagctaccaactctttttccgaaggtaactggcttcagcagagcgcagataccaaatactgtccttctagtgtagccgtagttaggccaccacttcaagaactctgtagcaccgcctacatacctcgctctgctaatcctgttaccagtggctgctgccagtggcgataagtcgtgtcttaccgggttggactcaagacgatagttaccggataaggcgcagcggtcgggctgaacggggggttcgtgcacacagcccagcttggagcgaacgacctacaccgaactgagatacctacagcgtgagctatgagaaagcgccacgcttcccgaagggagaaaggcggacaggtatccggtaagcggcagggtcggaacaggagagcgcacgagggagcttccagggggaaacgcctggtatctttatagtcctgtcgggtttcgccacctctgacttgagcgtcgatttttgtgatgctcgtcaggggggcggagcctatggaaaaacgccagcaacgcggcctttttacggttcctggccttttgctggccttttgctcacatgttctttcctgcgttatcccctgattctgctagcttaagcggccgcgatcttgcctgctgcagggggcagggcacagaagggaaactgcttgccctggggagtgggggacagcaggatgggagttgggggtggagggatgggagttggggggcggcaggatgggagttgggggtggcgggatgggaatgggggggcggcgggatgggagtggggggtggtgggatgggggtggggggaggcaggatggcccctctacctgttggcactttcctgctggaggctgtgggagtctgcagggcctctctacctggcccaggcaggaaggaggaaaacatcctggatgtgatggccactgtggcccaccatgcctggaccacttcggggagtggctgcttctctccactcactaatgtctgcttcccccgagcctggggcctctgccccctccctccctccatgcccatgtttctgtctgaccttggcgctggtagctctgtgacctcggctgggaaagtctgtctctgggctctgcctcctcctccccactcagtctctccaggattgacaaggccctgctccccggggacactgggagggctccctggcttgggtgtgtggccctgaagaggaaggaggattctgtggtgccactgtggacccccttgactgagtccctgccctccccagccctgcccggatgtctattggttccccatcttcacggaggtggcctgtgatgagctggtggaggagatggagcactttggccagtggtctctgggcaacaacaaggtgggaccctgatgcctgggctggggccgcagggaggctgcctctccatcagtgccgctcactgtctggggtcttctggcaagctggcctggccaccctttctgggactcttgacataggggtgctggcatgggtatctgcaggcaggtaggagtagagggattgagaaacctgagatggagtttggtccctgagctgctgttgccaccgtgtggctttgagttgccttgaccgtaagctactaggttttcagttcctggtttgctattggaatggcttagcttggttccctagacttcccccaggtggagctggggaggaaagggccaaggtgggatgaggggcattaggaagggctgatctcgagagctcaagcttactagtgtggataaccgtattaccgccatgcat

SEQ ID NO: 43291 - DNA, 5579 bp, ARTIFICIAL SEQUENCE
  vector containing human replication origin
tagttattaatagtaatcaattacggggtcattagttcatagcccatatatggagttccgcgttacataacttacggtaaatggcccgcctggctgaccgcccaacgacccccgcccattgacgtcaataatgacgtatgttcccatagtaacgccaatagggactttccattgacgtcaatgggtggagtatttacggtaaactgcccacttggcagtacatcaagtgtatcatatgccaagtacgccccctattgacgtcaatgacggtaaatggcccgcctggcattatgcccagtacatgaccttatgggactttcctacttggcagtacatctacgtattagtcatcgctattaccatggtgatgcggttttggcagtacatcaatgggcgtggatagcggtttgactcacggggatttccaagtctccaccccattgacgtcaatgggagtttgttttggcaccaaaatcaacgggactttccaaaatgtcgtaacaactccgccccattgacgcaaatgggcggtaggcgtgtacggtgggaggtctatataagcagagctggtttagtgaaccgtcagatccgctagagcatgaccgagtacaagcccacggtgcgcctcgccacccgcgacgacgtcccccgggccgtacgcaccctcgccgccgcgttcgccgactaccccgccacgcgccacaccgtcgacccggaccgccacatcgagcgggtcaccgagctgcaagaactcttcctcacgcgcgtcgggctcgacatcggcaaggtgtgggtcgcggacgacggcgccgcggtggcggtctggaccacgccggagagcgtcgaagcgggggcggtgttcgccgagatcggcccgcgcatggccgagttgagcggttcccggctggccgcgcagcaacagatggaaggcctcctggcgccgcaccggcccaaggagcccgcgtggttcctggccaccgtcggcgtctcgcccgaccaccagggcaagggtctgggcagcgccgtcgtgctccccggagtggaggcggccgagcgcgccggggtgcccgccttcctggagacctccgcgccccgcaacctccccttctacgagcggctcggcttcaccgtcaccgccgacgtcgaggtgcccgaaggaccgcgcacctggtgcatgacccgcaagcccggtgcctagctgattggtctaaaatgagatacatcaacgctcctccatgttttttgttttctttttaaatgaaaaactttattttttaagaggagtttcaggttcatagcaaaattgagaggaaggtacattcaagctgaggaagttttcctctattcctagtttactgagagattgcatcatgaatgggtgttaaattttgtcaaatgctttttctgtgtctatcaatatgaccatgtgattttcttctttaacctgttgatgggacaaattacgttaattgattttcaaacgttgaaccacccttacatatctggaataaattctacttggttgtggtgtatattttttgatacattcttggattctttttgctaatattttgttgaaaatgtttgtatctttgttcatgagagatattggtctgttgttttcttttcttgtaatgtcattttctagttccggtattaaggtaatgctggcctagttgaatgatttaggaagtattccctctgcttctgtcttctgaaagagattgtagaaagttgatacaatttttttttctttaaatatttgatagaattctgcagtgaattctgcagtcgacggtaccgcgggcccgggatccaccggatctagataactgatcataatcagccataccacatttgtagaggttttacttgctttaaaaaacctcccacacctccccctgaacctgaaacataaaatgaatgcaattgttgttgttaacttgtttattgcagcttataatggttacaaataaagcaatagcatcacaaatttcacaaataaagcatttttttcactgcattctagttgtggtttgtccaaactcatcaatgtatcttaacgcgtaaattgtaagcgttaatattttgttaaaattcgcgttaaatttttgttaaatcagctcattttttaaccaataggccgaaatcggcgcggaacccctatttgtttatttttctaaatacattcaaatatgtatccgctcatgagacaataaccctgataaatgcttcaataatattgaaaaaggaagagtcaggatgaggatcgtttcgcatgattgaacaagatggattgcacgcaggttctccggccgcttgggtggagaggctattcggctatgactgggcacaacagacaatcggctgctctgatgccgccgtgttccggctgtcagcgcaggggcgcccggttctttttgtcaagaccgacctgtccggtgccctgaatgaactgcaagacgaggcagcgcggctatcgtggctggccacgacgggcgttccttgcgcagctgtgctcgacgttgtcactgaagcgggaagggactggctgctattgggcgaagtgccggggcaggatctcctgtcatctcaccttgctcctgccgagaaagtatccatcatggctgatgcaatgcggcggctgcatacgcttgatccggctacctgcccattcgaccaccaagcgaaacatcgcatcgagcgagcacgtactcggatggaagccggtcttgtcgatcaggatgatctggacgaagagcatcaggggctcgcgccagccgaactgttcgccaggctcaaggcgagcatgcccgacggcgaggatctcgtcgtgacccatggcgatgcctgcttgccgaatatcatggtggaaaatggccgcttttctggattcatcgactgtggccggctgggtgtggcggaccgctatcaggacatagcgttggctacccgtgatattgctgaagagcttggcggcgaatgggctgaccgcttcctcgtgctttacggtatcgccgctcccgattcgcagcgcatcgccttctatcgccttcttgacgagttcttctgagcgggactctggggttcgaaatgaccgaccaagcgacgcccaacctgccatcacgagatttcgattccaccgccgccttctatgaaaggttgggcttcggaatcgttttccgggacgccggctggatgatcctccagcgcggggatctcatgctggagttcttcgcccaccctagggggaggctaactgaaacacggaaggagacaataccggaaggaacccgcgctatgacggcaataaaaagacagaataaaacgcacggtgttgggtcgtttgttcataaacgcggggttcggtcccagggctggcactctgtcgataccccaccgagaccccattggggccaatacgcccgcgtttcttccttttccccaccccaccccccaagttcgggtgaaggcccagggctcgcagccaacgtcggggcggcaggccctgccatagcctcaggttactcatatatactttagattgatttaaaacttcatttttaatttaaaaggatctaggtgaagatcctttttgataatctcatgaccaaaatcccttaacgtgagttttcgttccactgagcgtcagaccccgtagaaaagatcaaaggatcttcttgagatcctttttttctgcgcgtaatctgctgcttgcaaacaaaaaaaccaccgctaccagcggtggtttgtttgccggatcaagagctaccaactctttttccgaaggtaactggcttcagcagagcgcagataccaaatactgtccttctagtgtagccgtagttaggccaccacttcaagaactctgtagcaccgcctacatacctcgctctgctaatcctgttaccagtggctgctgccagtggcgataagtcgtgtcttaccgggttggactcaagacgatagttaccggataaggcgcagcggtcgggctgaacggggggttcgtgcacacagcccagcttggagcgaacgacctacaccgaactgagatacctacagcgtgagctatgagaaagcgccacgcttcccgaagggagaaaggcggacaggtatccggtaagcggcagggtcggaacaggagagcgcacgagggagcttccagggggaaacgcctggtatctttatagtcctgtcgggtttcgccacctctgacttgagcgtcgatttttgtgatgctcgtcaggggggcggagcctatggaaaaacgccagcaacgcggcctttttacggttcctggccttttgctggccttttgctcacatgttctttcctgcgttatcccctgattctgctagcttaagcggccgcgatcgggagaaggggcgggggcgacgcgcgccgcctcctgttaaagggggaacagcgccagccgagccgatcgtgccccccacctccccgccttgggccccaggcgccggcgcgggagaagccctgggtaagcccccgcccagcccgctgcttcttggaccgcagaatgaggcgatccgcgacgcccctccagctatacccatgccggaggcttgtcgcgccgccagggtgtcccgggccctgcaggctgaagcatttgctcaccttcccatgtgcattgcatattgcatgtccctgtgcatgcaggtgccagtcatgtgcgctgaactttgcatatgcatacaggtgccctaagtgtgcactgccatgttgcctgggtaggtgcatgcaagtgccacacacatgcacggtgtattaacatgtgcccaagtcctgaatgcatgttgcttgttcctgtgcgcagggatgttatatgtatgcaagcttacaggtgccacatgtgtgctgaggactgtgggtaactcatgtagcagccacatatgtatactgcaatgtgacatgtttgatgcatactgtaaactgcaatgttgcacgtccttaggcacggggatgctacacgtgtgcagtgtgttacatgttttcctgagtccctgtctattcccacaagtgcctttccctgtgccaggggcgcccccatgttgcatctgtttgtgtagaagcagcagagatgtacagacccaccccttccccatcttggcactaagcccagaaacagttgggtggggcctgagccctcatggttcaggcggtacacagggagatgcccatggttcagggctctggtcaggcagtttgtggcctgggcatgttgccatcagtaaggtaggccgaccagggacgcaccattgcagccaacacaagtaggttaatcccatggctttggtcagaggagaaaccagcagggggcagctttgcaataagggtgggatggtttcagctttgcgatgagggtgggatggtttcaggaccatactttttgaaggttcactagccaggaagggccaaattttcagtgcaaagaagtcctcatttcagcaaataccaaccccacctctccactgatgccccttaagttgtggcaccctcaagatggatctcgagagctcaagcttactagtgtggataaccgtattaccgccatgcat

SEQ ID NO: 43292 - DNA, 5579 bp, ARTIFICIAL SEQUENCE
  vector containing human replication origin
tagttattaatagtaatcaattacggggtcattagttcatagcccatatatggagttccgcgttacataacttacggtaaatggcccgcctggctgaccgcccaacgacccccgcccattgacgtcaataatgacgtatgttcccatagtaacgccaatagggactttccattgacgtcaatgggtggagtatttacggtaaactgcccacttggcagtacatcaagtgtatcatatgccaagtacgccccctattgacgtcaatgacggtaaatggcccgcctggcattatgcccagtacatgaccttatgggactttcctacttggcagtacatctacgtattagtcatcgctattaccatggtgatgcggttttggcagtacatcaatgggcgtggatagcggtttgactcacggggatttccaagtctccaccccattgacgtcaatgggagtttgttttggcaccaaaatcaacgggactttccaaaatgtcgtaacaactccgccccattgacgcaaatgggcggtaggcgtgtacggtgggaggtctatataagcagagctggtttagtgaaccgtcagatccgctagagcatgaccgagtacaagcccacggtgcgcctcgccacccgcgacgacgtcccccgggccgtacgcaccctcgccgccgcgttcgccgactaccccgccacgcgccacaccgtcgacccggaccgccacatcgagcgggtcaccgagctgcaagaactcttcctcacgcgcgtcgggctcgacatcggcaaggtgtgggtcgcggacgacggcgccgcggtggcggtctggaccacgccggagagcgtcgaagcgggggcggtgttcgccgagatcggcccgcgcatggccgagttgagcggttcccggctggccgcgcagcaacagatggaaggcctcctggcgccgcaccggcccaaggagcccgcgtggttcctggccaccgtcggcgtctcgcccgaccaccagggcaagggtctgggcagcgccgtcgtgctccccggagtggaggcggccgagcgcgccggggtgcccgccttcctggagacctccgcgccccgcaacctccccttctacgagcggctcggcttcaccgtcaccgccgacgtcgaggtgcccgaaggaccgcgcacctggtgcatgacccgcaagcccggtgcctagctgattggtctaaaatgagatacatcaacgctcctccatgttttttgttttctttttaaatgaaaaactttattttttaagaggagtttcaggttcatagcaaaattgagaggaaggtacattcaagctgaggaagttttcctctattcctagtttactgagagattgcatcatgaatgggtgttaaattttgtcaaatgctttttctgtgtctatcaatatgaccatgtgattttcttctttaacctgttgatgggacaaattacgttaattgattttcaaacgttgaaccacccttacatatctggaataaattctacttggttgtggtgtatattttttgatacattcttggattctttttgctaatattttgttgaaaatgtttgtatctttgttcatgagagatattggtctgttgttttcttttcttgtaatgtcattttctagttccggtattaaggtaatgctggcctagttgaatgatttaggaagtattccctctgcttctgtcttctgaaagagattgtagaaagttgatacaatttttttttctttaaatatttgatagaattctgcagtgaattctgcagtcgacggtaccgcgggcccgggatccaccggatctagataactgatcataatcagccataccacatttgtagaggttttacttgctttaaaaaacctcccacacctccccctgaacctgaaacataaaatgaatgcaattgttgttgttaacttgtttattgcagcttataatggttacaaataaagcaatagcatcacaaatttcacaaataaagcatttttttcactgcattctagttgtggtttgtccaaactcatcaatgtatcttaacgcgtaaattgtaagcgttaatattttgttaaaattcgcgttaaatttttgttaaatcagctcattttttaaccaataggccgaaatcggcgcggaacccctatttgtttatttttctaaatacattcaaatatgtatccgctcatgagacaataaccctgataaatgcttcaataatattgaaaaaggaagagtcaggatgaggatcgtttcgcatgattgaacaagatggattgcacgcaggttctccggccgcttgggtggagaggctattcggctatgactgggcacaacagacaatcggctgctctgatgccgccgtgttccggctgtcagcgcaggggcgcccggttctttttgtcaagaccgacctgtccggtgccctgaatgaactgcaagacgaggcagcgcggctatcgtggctggccacgacgggcgttccttgcgcagctgtgctcgacgttgtcactgaagcgggaagggactggctgctattgggcgaagtgccggggcaggatctcctgtcatctcaccttgctcctgccgagaaagtatccatcatggctgatgcaatgcggcggctgcatacgcttgatccggctacctgcccattcgaccaccaagcgaaacatcgcatcgagcgagcacgtactcggatggaagccggtcttgtcgatcaggatgatctggacgaagagcatcaggggctcgcgccagccgaactgttcgccaggctcaaggcgagcatgcccgacggcgaggatctcgtcgtgacccatggcgatgcctgcttgccgaatatcatggtggaaaatggccgcttttctggattcatcgactgtggccggctgggtgtggcggaccgctatcaggacatagcgttggctacccgtgatattgctgaagagcttggcggcgaatgggctgaccgcttcctcgtgctttacggtatcgccgctcccgattcgcagcgcatcgccttctatcgccttcttgacgagttcttctgagcgggactctggggttcgaaatgaccgaccaagcgacgcccaacctgccatcacgagatttcgattccaccgccgccttctatgaaaggttgggcttcggaatcgttttccgggacgccggctggatgatcctccagcgcggggatctcatgctggagttcttcgcccaccctagggggaggctaactgaaacacggaaggagacaataccggaaggaacccgcgctatgacggcaataaaaagacagaataaaacgcacggtgttgggtcgtttgttcataaacgcggggttcggtcccagggctggcactctgtcgataccccaccgagaccccattggggccaatacgcccgcgtttcttccttttccccaccccaccccccaagttcgggtgaaggcccagggctcgcagccaacgtcggggcggcaggccctgccatagcctcaggttactcatatatactttagattgatttaaaacttcatttttaatttaaaaggatctaggtgaagatcctttttgataatctcatgaccaaaatcccttaacgtgagttttcgttccactgagcgtcagaccccgtagaaaagatcaaaggatcttcttgagatcctttttttctgcgcgtaatctgctgcttgcaaacaaaaaaaccaccgctaccagcggtggtttgtttgccggatcaagagctaccaactctttttccgaaggtaactggcttcagcagagcgcagataccaaatactgtccttctagtgtagccgtagttaggccaccacttcaagaactctgtagcaccgcctacatacctcgctctgctaatcctgttaccagtggctgctgccagtggcgataagtcgtgtcttaccgggttggactcaagacgatagttaccggataaggcgcagcggtcgggctgaacggggggttcgtgcacacagcccagcttggagcgaacgacctacaccgaactgagatacctacagcgtgagctatgagaaagcgccacgcttcccgaagggagaaaggcggacaggtatccggtaagcggcagggtcggaacaggagagcgcacgagggagcttccagggggaaacgcctggtatctttatagtcctgtcgggtttcgccacctctgacttgagcgtcgatttttgtgatgctcgtcaggggggcggagcctatggaaaaacgccagcaacgcggcctttttacggttcctggccttttgctggccttttgctcacatgttctttcctgcgttatcccctgattctgctagcttaagcggccgcgatcctaggtggggaggcacgggtgctgggtggactctaacccccaaacagacttgtttggggatgagggagtgtgcagataggggcccctgggtgtgtttgtgcctgtagtccttctaggcccgtttgctcagggctctgactgaccaccatgcccgaattgtctgacagcatctacttacctggttgtacagtcgggcaccatcatctccgtccttgtgaggcctggagcctaggcagtggtctctgcctccagtgatggtcctgtccttctagcagcagcccctcccagaaacctctactctgatccttgttcccagggcccagggcagctcctcccaccccatccaatctcgttttctccttccctgaccctgtttcctgttaccccagaagccccagccacctccagcccacgcctttaagggtcctgccccctctctgctggccgaccttgaatcttggtccaattaaagagttgacaaatccctagccccgcagcctgagtccgcccaacctccaggtccccttcctggggagttcgcgctccaatgcaatccccactccccgctaagggactccacggtctgcacccgctcgccggtccgacctctaagcccaccctttggacgagcctgacccatttcctcccgcgctcccaggtccgtgcctcctgggtgcccgggttcggccgccggcagggcgggctcgcagcggcgcgcggcgggtgcgggcgtgctggaggcgggggccgcgggggcgcgcgcgcgggcgcgcgggccgggcctgcccctccgaggcgccgtagcgcgggagggaggcggcggcgctgtggtccgtgggtccgccggtccgtgggtctgcccggccgcccggccccgccctgccccccggggcggctcggctccatggcccgcggcggcggcggcggcggcggcggcgggaggcgacccgggggccgcggtggccgctgaccgggcggcgggaggcggcggggccgggccatgggggacggaaccgtccgcagccgccggagccgggagccctgcccaagtcggagcggcgtcccctgctgagccccgagcgccgggtgagaggagggcgcgcgcggcccccacccagggccccgagattccagacccagccccgcgagatctcgagagctcaagcttactagtgtggataaccgtattaccgccatgcat

SEQ ID NO: 43293 - DNA, 5579 bp, ARTIFICIAL SEQUENCE
  vector containing human replication origin
tagttattaatagtaatcaattacggggtcattagttcatagcccatatatggagttccgcgttacataacttacggtaaatggcccgcctggctgaccgcccaacgacccccgcccattgacgtcaataatgacgtatgttcccatagtaacgccaatagggactttccattgacgtcaatgggtggagtatttacggtaaactgcccacttggcagtacatcaagtgtatcatatgccaagtacgccccctattgacgtcaatgacggtaaatggcccgcctggcattatgcccagtacatgaccttatgggactttcctacttggcagtacatctacgtattagtcatcgctattaccatggtgatgcggttttggcagtacatcaatgggcgtggatagcggtttgactcacggggatttccaagtctccaccccattgacgtcaatgggagtttgttttggcaccaaaatcaacgggactttccaaaatgtcgtaacaactccgccccattgacgcaaatgggcggtaggcgtgtacggtgggaggtctatataagcagagctggtttagtgaaccgtcagatccgctagagcatgaccgagtacaagcccacggtgcgcctcgccacccgcgacgacgtcccccgggccgtacgcaccctcgccgccgcgttcgccgactaccccgccacgcgccacaccgtcgacccggaccgccacatcgagcgggtcaccgagctgcaagaactcttcctcacgcgcgtcgggctcgacatcggcaaggtgtgggtcgcggacgacggcgccgcggtggcggtctggaccacgccggagagcgtcgaagcgggggcggtgttcgccgagatcggcccgcgcatggccgagttgagcggttcccggctggccgcgcagcaacagatggaaggcctcctggcgccgcaccggcccaaggagcccgcgtggttcctggccaccgtcggcgtctcgcccgaccaccagggcaagggtctgggcagcgccgtcgtgctccccggagtggaggcggccgagcgcgccggggtgcccgccttcctggagacctccgcgccccgcaacctccccttctacgagcggctcggcttcaccgtcaccgccgacgtcgaggtgcccgaaggaccgcgcacctggtgcatgacccgcaagcccggtgcctagctgattggtctaaaatgagatacatcaacgctcctccatgttttttgttttctttttaaatgaaaaactttattttttaagaggagtttcaggttcatagcaaaattgagaggaaggtacattcaagctgaggaagttttcctctattcctagtttactgagagattgcatcatgaatgggtgttaaattttgtcaaatgctttttctgtgtctatcaatatgaccatgtgattttcttctttaacctgttgatgggacaaattacgttaattgattttcaaacgttgaaccacccttacatatctggaataaattctacttggttgtggtgtatattttttgatacattcttggattctttttgctaatattttgttgaaaatgtttgtatctttgttcatgagagatattggtctgttgttttcttttcttgtaatgtcattttctagttccggtattaaggtaatgctggcctagttgaatgatttaggaagtattccctctgcttctgtcttctgaaagagattgtagaaagttgatacaatttttttttctttaaatatttgatagaattctgcagtgaattctgcagtcgacggtaccgcgggcccgggatccaccggatctagataactgatcataatcagccataccacatttgtagaggttttacttgctttaaaaaacctcccacacctccccctgaacctgaaacataaaatgaatgcaattgttgttgttaacttgtttattgcagcttataatggttacaaataaagcaatagcatcacaaatttcacaaataaagcatttttttcactgcattctagttgtggtttgtccaaactcatcaatgtatcttaacgcgtaaattgtaagcgttaatattttgttaaaattcgcgttaaatttttgttaaatcagctcattttttaaccaataggccgaaatcggcgcggaacccctatttgtttatttttctaaatacattcaaatatgtatccgctcatgagacaataaccctgataaatgcttcaataatattgaaaaaggaagagtcaggatgaggatcgtttcgcatgattgaacaagatggattgcacgcaggttctccggccgcttgggtggagaggctattcggctatgactgggcacaacagacaatcggctgctctgatgccgccgtgttccggctgtcagcgcaggggcgcccggttctttttgtcaagaccgacctgtccggtgccctgaatgaactgcaagacgaggcagcgcggctatcgtggctggccacgacgggcgttccttgcgcagctgtgctcgacgttgtcactgaagcgggaagggactggctgctattgggcgaagtgccggggcaggatctcctgtcatctcaccttgctcctgccgagaaagtatccatcatggctgatgcaatgcggcggctgcatacgcttgatccggctacctgcccattcgaccaccaagcgaaacatcgcatcgagcgagcacgtactcggatggaagccggtcttgtcgatcaggatgatctggacgaagagcatcaggggctcgcgccagccgaactgttcgccaggctcaaggcgagcatgcccgacggcgaggatctcgtcgtgacccatggcgatgcctgcttgccgaatatcatggtggaaaatggccgcttttctggattcatcgactgtggccggctgggtgtggcggaccgctatcaggacatagcgttggctacccgtgatattgctgaagagcttggcggcgaatgggctgaccgcttcctcgtgctttacggtatcgccgctcccgattcgcagcgcatcgccttctatcgccttcttgacgagttcttctgagcgggactctggggttcgaaatgaccgaccaagcgacgcccaacctgccatcacgagatttcgattccaccgccgccttctatgaaaggttgggcttcggaatcgttttccgggacgccggctggatgatcctccagcgcggggatctcatgctggagttcttcgcccaccctagggggaggctaactgaaacacggaaggagacaataccggaaggaacccgcgctatgacggcaataaaaagacagaataaaacgcacggtgttgggtcgtttgttcataaacgcggggttcggtcccagggctggcactctgtcgataccccaccgagaccccattggggccaatacgcccgcgtttcttccttttccccaccccaccccccaagttcgggtgaaggcccagggctcgcagccaacgtcggggcggcaggccctgccatagcctcaggttactcatatatactttagattgatttaaaacttcatttttaatttaaaaggatctaggtgaagatcctttttgataatctcatgaccaaaatcccttaacgtgagttttcgttccactgagcgtcagaccccgtagaaaagatcaaaggatcttcttgagatcctttttttctgcgcgtaatctgctgcttgcaaacaaaaaaaccaccgctaccagcggtggtttgtttgccggatcaagagctaccaactctttttccgaaggtaactggcttcagcagagcgcagataccaaatactgtccttctagtgtagccgtagttaggccaccacttcaagaactctgtagcaccgcctacatacctcgctctgctaatcctgttaccagtggctgctgccagtggcgataagtcgtgtcttaccgggttggactcaagacgatagttaccggataaggcgcagcggtcgggctgaacggggggttcgtgcacacagcccagcttggagcgaacgacctacaccgaactgagatacctacagcgtgagctatgagaaagcgccacgcttcccgaagggagaaaggcggacaggtatccggtaagcggcagggtcggaacaggagagcgcacgagggagcttccagggggaaacgcctggtatctttatagtcctgtcgggtttcgccacctctgacttgagcgtcgatttttgtgatgctcgtcaggggggcggagcctatggaaaaacgccagcaacgcggcctttttacggttcctggccttttgctggccttttgctcacatgttctttcctgcgttatcccctgattctgctagcttaagcggccgcgatgggaggagcctcggaaggcggcgcaccgcgccgcacactcagtccaagaacccgcctcgcgtcactgtcgccgtcagggccgcggagccaatcagagcccaagtcgagggctgcgctttgcgagcgccagccaatcggtgcggcggcgggcccatcctgatttgcatgtccgacgacccctcaaccaatggtaatgtgactggcgtgaacaatagccaatcagaagctggaagaggcgtggccccgggcgtcccacgaggtgaagatgctgctggcggaacctgcaggagctagcgggattcgggggcgctaaagtcgcaggggcagggcgggaaggaagatccggcgcggggcacaggatccggagctggagcccccaggtgagtaccggggagaccccggcggggcgcgctttccaccaagctgctccgggacggcggcggcgggtatccgcgaggcccgcgctgcggcaggcgccgcggtcccgtctccatctcttcttccccggccctgcgtccctgcctccgccgctgtctcacctcctctccagcctcctcacctccttctccatcgtctcccttcccccatccctttctgtctttccttccctgtcctcccgcccgcccgacccttcagctcgcatccctgacccctgcccctgccgccgtccctcttcccggtgcacctcttccccatctctgcccgctccggtcctagcagcctcgccctcccctttcctccatcctcctctcatcccctctcccggcctctgcgcagccccaccggggcgctgctgttcccggtcctccccatctctcctcctgatcgcttctcaaggctcatccgtcgttctcgctgcctgtccctgtgtcgctccggtccctttccccaccctcccattctgcccccagcccctccgacctctccccgcgggcacgctctcaccaccttaccctgctccccaagactgtgaccctgcttcctgcaccagttcctcgggctgtttacagcacacacaccgccacttctgaccctgagcccctactcctatcttaagcttctccctcctgccaggccttggcacaaagcacttccgcacctccctacctgctgctgctcccaggatgcaaagaccccactgctgcaccgcatctcgagagctcaagcttactagtgtggataaccgtattaccgccatgcat

SEQ ID NO: 43294 - DNA, 5429 bp, ARTIFICIAL SEQUENCE
  vector containing human replication origin
tagttattaatagtaatcaattacggggtcattagttcatagcccatatatggagttccgcgttacataacttacggtaaatggcccgcctggctgaccgcccaacgacccccgcccattgacgtcaataatgacgtatgttcccatagtaacgccaatagggactttccattgacgtcaatgggtggagtatttacggtaaactgcccacttggcagtacatcaagtgtatcatatgccaagtacgccccctattgacgtcaatgacggtaaatggcccgcctggcattatgcccagtacatgaccttatgggactttcctacttggcagtacatctacgtattagtcatcgctattaccatggtgatgcggttttggcagtacatcaatgggcgtggatagcggtttgactcacggggatttccaagtctccaccccattgacgtcaatgggagtttgttttggcaccaaaatcaacgggactttccaaaatgtcgtaacaactccgccccattgacgcaaatgggcggtaggcgtgtacggtgggaggtctatataagcagagctggtttagtgaaccgtcagatccgctagagcatgaccgagtacaagcccacggtgcgcctcgccacccgcgacgacgtcccccgggccgtacgcaccctcgccgccgcgttcgccgactaccccgccacgcgccacaccgtcgacccggaccgccacatcgagcgggtcaccgagctgcaagaactcttcctcacgcgcgtcgggctcgacatcggcaaggtgtgggtcgcggacgacggcgccgcggtggcggtctggaccacgccggagagcgtcgaagcgggggcggtgttcgccgagatcggcccgcgcatggccgagttgagcggttcccggctggccgcgcagcaacagatggaaggcctcctggcgccgcaccggcccaaggagcccgcgtggttcctggccaccgtcggcgtctcgcccgaccaccagggcaagggtctgggcagcgccgtcgtgctccccggagtggaggcggccgagcgcgccggggtgcccgccttcctggagacctccgcgccccgcaacctccccttctacgagcggctcggcttcaccgtcaccgccgacgtcgaggtgcccgaaggaccgcgcacctggtgcatgacccgcaagcccggtgcctagctgattggtctaaaatgagatacatcaacgctcctccatgttttttgttttctttttaaatgaaaaactttattttttaagaggagtttcaggttcatagcaaaattgagaggaaggtacattcaagctgaggaagttttcctctattcctagtttactgagagattgcatcatgaatgggtgttaaattttgtcaaatgctttttctgtgtctatcaatatgaccatgtgattttcttctttaacctgttgatgggacaaattacgttaattgattttcaaacgttgaaccacccttacatatctggaataaattctacttggttgtggtgtatattttttgatacattcttggattctttttgctaatattttgttgaaaatgtttgtatctttgttcatgagagatattggtctgttgttttcttttcttgtaatgtcattttctagttccggtattaaggtaatgctggcctagttgaatgatttaggaagtattccctctgcttctgtcttctgaaagagattgtagaaagttgatacaatttttttttctttaaatatttgatagaattctgcagtgaattctgcagtcgacggtaccgcgggcccgggatccaccggatctagataactgatcataatcagccataccacatttgtagaggttttacttgctttaaaaaacctcccacacctccccctgaacctgaaacataaaatgaatgcaattgttgttgttaacttgtttattgcagcttataatggttacaaataaagcaatagcatcacaaatttcacaaataaagcatttttttcactgcattctagttgtggtttgtccaaactcatcaatgtatcttaacgcgtaaattgtaagcgttaatattttgttaaaattcgcgttaaatttttgttaaatcagctcattttttaaccaataggccgaaatcggcgcggaacccctatttgtttatttttctaaatacattcaaatatgtatccgctcatgagacaataaccctgataaatgcttcaataatattgaaaaaggaagagtcaggatgaggatcgtttcgcatgattgaacaagatggattgcacgcaggttctccggccgcttgggtggagaggctattcggctatgactgggcacaacagacaatcggctgctctgatgccgccgtgttccggctgtcagcgcaggggcgcccggttctttttgtcaagaccgacctgtccggtgccctgaatgaactgcaagacgaggcagcgcggctatcgtggctggccacgacgggcgttccttgcgcagctgtgctcgacgttgtcactgaagcgggaagggactggctgctattgggcgaagtgccggggcaggatctcctgtcatctcaccttgctcctgccgagaaagtatccatcatggctgatgcaatgcggcggctgcatacgcttgatccggctacctgcccattcgaccaccaagcgaaacatcgcatcgagcgagcacgtactcggatggaagccggtcttgtcgatcaggatgatctggacgaagagcatcaggggctcgcgccagccgaactgttcgccaggctcaaggcgagcatgcccgacggcgaggatctcgtcgtgacccatggcgatgcctgcttgccgaatatcatggtggaaaatggccgcttttctggattcatcgactgtggccggctgggtgtggcggaccgctatcaggacatagcgttggctacccgtgatattgctgaagagcttggcggcgaatgggctgaccgcttcctcgtgctttacggtatcgccgctcccgattcgcagcgcatcgccttctatcgccttcttgacgagttcttctgagcgggactctggggttcgaaatgaccgaccaagcgacgcccaacctgccatcacgagatttcgattccaccgccgccttctatgaaaggttgggcttcggaatcgttttccgggacgccggctggatgatcctccagcgcggggatctcatgctggagttcttcgcccaccctagggggaggctaactgaaacacggaaggagacaataccggaaggaacccgcgctatgacggcaataaaaagacagaataaaacgcacggtgttgggtcgtttgttcataaacgcggggttcggtcccagggctggcactctgtcgataccccaccgagaccccattggggccaatacgcccgcgtttcttccttttccccaccccaccccccaagttcgggtgaaggcccagggctcgcagccaacgtcggggcggcaggccctgccatagcctcaggttactcatatatactttagattgatttaaaacttcatttttaatttaaaaggatctaggtgaagatcctttttgataatctcatgaccaaaatcccttaacgtgagttttcgttccactgagcgtcagaccccgtagaaaagatcaaaggatcttcttgagatcctttttttctgcgcgtaatctgctgcttgcaaacaaaaaaaccaccgctaccagcggtggtttgtttgccggatcaagagctaccaactctttttccgaaggtaactggcttcagcagagcgcagataccaaatactgtccttctagtgtagccgtagttaggccaccacttcaagaactctgtagcaccgcctacatacctcgctctgctaatcctgttaccagtggctgctgccagtggcgataagtcgtgtcttaccgggttggactcaagacgatagttaccggataaggcgcagcggtcgggctgaacggggggttcgtgcacacagcccagcttggagcgaacgacctacaccgaactgagatacctacagcgtgagctatgagaaagcgccacgcttcccgaagggagaaaggcggacaggtatccggtaagcggcagggtcggaacaggagagcgcacgagggagcttccagggggaaacgcctggtatctttatagtcctgtcgggtttcgccacctctgacttgagcgtcgatttttgtgatgctcgtcaggggggcggagcctatggaaaaacgccagcaacgcggcctttttacggttcctggccttttgctggccttttgctcacatgttctttcctgcgttatcccctgattctgctagcttaagcggccgcgatacagctgattctgtttttccttcccagccaatggtgatcaaaagcttcaggacgctggtgagtcactgcggaggagccgaacactgaccgcgccgtccccgccaggctcccgcgcggccggcaccgcggccctgagcgcaggcggccccgggtctcaggcctcaggcggaccgcgccccgggctcgcagccctcccgccccggctgccgggctacggggcagatggactcggagcgccccgccggtgagtagctacgacccccgaggccacctcccgcgaaccgctcggcggcaggagtacgtgaccaagggtgggggcgttggcccagcagccgaaggggtcttcagcgcgcccagacccctcggggctgcggggcggaagccggggcgtgacttccggcgccgccgggtgtggggcggaggtgtggggcggcttccggagaacccagcggcgcgggactggggcgggacttccggcgacaccggaagtgcattagcgccaggttggggttgtggggtcgcgtcagtgcggagacagcggtgtcctgcgcgtcttcgggtcagtacggggggccgcgtcgtagggactcactggcggtgcgcgacctgggctggctccgggggtggcgggcgcagctgctgtgacaggtgagtgccgccatcttcctacctgtcaggcgccgagtcgttccccggatgccccgaagaggagtcgggacactgcagggctcaagggggtgcaggggcagtcggggcatagtggcggatggggtgcaggtgggcttggaatgcagagggtccgtggtggtgcaggaggggtcgggtccctggaggacccgtggcggtgcaggaagggccgtggtgcagaagggttcagggtgcaagagaagtcggggcgcaggagtagtccgtggcggtgccagagggaccagggtgcgggagggatgggggcccggggcggtgcagaagatgtcggagtccaggaagagtcggggcgctgatctcgagagctcaagcttactagtgtggataaccgtattaccgccatgcat

SEQ ID NO: 43295 - DNA, 5209 bp, ARTIFICIAL SEQUENCE
  vector containing human replication origin
tagttattaatagtaatcaattacggggtcattagttcatagcccatatatggagttccgcgttacataacttacggtaaatggcccgcctggctgaccgcccaacgacccccgcccattgacgtcaataatgacgtatgttcccatagtaacgccaatagggactttccattgacgtcaatgggtggagtatttacggtaaactgcccacttggcagtacatcaagtgtatcatatgccaagtacgccccctattgacgtcaatgacggtaaatggcccgcctggcattatgcccagtacatgaccttatgggactttcctacttggcagtacatctacgtattagtcatcgctattaccatggtgatgcggttttggcagtacatcaatgggcgtggatagcggtttgactcacggggatttccaagtctccaccccattgacgtcaatgggagtttgttttggcaccaaaatcaacgggactttccaaaatgtcgtaacaactccgccccattgacgcaaatgggcggtaggcgtgtacggtgggaggtctatataagcagagctggtttagtgaaccgtcagatccgctagagcatgaccgagtacaagcccacggtgcgcctcgccacccgcgacgacgtcccccgggccgtacgcaccctcgccgccgcgttcgccgactaccccgccacgcgccacaccgtcgacccggaccgccacatcgagcgggtcaccgagctgcaagaactcttcctcacgcgcgtcgggctcgacatcggcaaggtgtgggtcgcggacgacggcgccgcggtggcggtctggaccacgccggagagcgtcgaagcgggggcggtgttcgccgagatcggcccgcgcatggccgagttgagcggttcccggctggccgcgcagcaacagatggaaggcctcctggcgccgcaccggcccaaggagcccgcgtggttcctggccaccgtcggcgtctcgcccgaccaccagggcaagggtctgggcagcgccgtcgtgctccccggagtggaggcggccgagcgcgccggggtgcccgccttcctggagacctccgcgccccgcaacctccccttctacgagcggctcggcttcaccgtcaccgccgacgtcgaggtgcccgaaggaccgcgcacctggtgcatgacccgcaagcccggtgcctagctgattggtctaaaatgagatacatcaacgctcctccatgttttttgttttctttttaaatgaaaaactttattttttaagaggagtttcaggttcatagcaaaattgagaggaaggtacattcaagctgaggaagttttcctctattcctagtttactgagagattgcatcatgaatgggtgttaaattttgtcaaatgctttttctgtgtctatcaatatgaccatgtgattttcttctttaacctgttgatgggacaaattacgttaattgattttcaaacgttgaaccacccttacatatctggaataaattctacttggttgtggtgtatattttttgatacattcttggattctttttgctaatattttgttgaaaatgtttgtatctttgttcatgagagatattggtctgttgttttcttttcttgtaatgtcattttctagttccggtattaaggtaatgctggcctagttgaatgatttaggaagtattccctctgcttctgtcttctgaaagagattgtagaaagttgatacaatttttttttctttaaatatttgatagaattctgcagtgaattctgcagtcgacggtaccgcgggcccgggatccaccggatctagataactgatcataatcagccataccacatttgtagaggttttacttgctttaaaaaacctcccacacctccccctgaacctgaaacataaaatgaatgcaattgttgttgttaacttgtttattgcagcttataatggttacaaataaagcaatagcatcacaaatttcacaaataaagcatttttttcactgcattctagttgtggtttgtccaaactcatcaatgtatcttaacgcgtaaattgtaagcgttaatattttgttaaaattcgcgttaaatttttgttaaatcagctcattttttaaccaataggccgaaatcggcgcggaacccctatttgtttatttttctaaatacattcaaatatgtatccgctcatgagacaataaccctgataaatgcttcaataatattgaaaaaggaagagtcaggatgaggatcgtttcgcatgattgaacaagatggattgcacgcaggttctccggccgcttgggtggagaggctattcggctatgactgggcacaacagacaatcggctgctctgatgccgccgtgttccggctgtcagcgcaggggcgcccggttctttttgtcaagaccgacctgtccggtgccctgaatgaactgcaagacgaggcagcgcggctatcgtggctggccacgacgggcgttccttgcgcagctgtgctcgacgttgtcactgaagcgggaagggactggctgctattgggcgaagtgccggggcaggatctcctgtcatctcaccttgctcctgccgagaaagtatccatcatggctgatgcaatgcggcggctgcatacgcttgatccggctacctgcccattcgaccaccaagcgaaacatcgcatcgagcgagcacgtactcggatggaagccggtcttgtcgatcaggatgatctggacgaagagcatcaggggctcgcgccagccgaactgttcgccaggctcaaggcgagcatgcccgacggcgaggatctcgtcgtgacccatggcgatgcctgcttgccgaatatcatggtggaaaatggccgcttttctggattcatcgactgtggccggctgggtgtggcggaccgctatcaggacatagcgttggctacccgtgatattgctgaagagcttggcggcgaatgggctgaccgcttcctcgtgctttacggtatcgccgctcccgattcgcagcgcatcgccttctatcgccttcttgacgagttcttctgagcgggactctggggttcgaaatgaccgaccaagcgacgcccaacctgccatcacgagatttcgattccaccgccgccttctatgaaaggttgggcttcggaatcgttttccgggacgccggctggatgatcctccagcgcggggatctcatgctggagttcttcgcccaccctagggggaggctaactgaaacacggaaggagacaataccggaaggaacccgcgctatgacggcaataaaaagacagaataaaacgcacggtgttgggtcgtttgttcataaacgcggggttcggtcccagggctggcactctgtcgataccccaccgagaccccattggggccaatacgcccgcgtttcttccttttccccaccccaccccccaagttcgggtgaaggcccagggctcgcagccaacgtcggggcggcaggccctgccatagcctcaggttactcatatatactttagattgatttaaaacttcatttttaatttaaaaggatctaggtgaagatcctttttgataatctcatgaccaaaatcccttaacgtgagttttcgttccactgagcgtcagaccccgtagaaaagatcaaaggatcttcttgagatcctttttttctgcgcgtaatctgctgcttgcaaacaaaaaaaccaccgctaccagcggtggtttgtttgccggatcaagagctaccaactctttttccgaaggtaactggcttcagcagagcgcagataccaaatactgtccttctagtgtagccgtagttaggccaccacttcaagaactctgtagcaccgcctacatacctcgctctgctaatcctgttaccagtggctgctgccagtggcgataagtcgtgtcttaccgggttggactcaagacgatagttaccggataaggcgcagcggtcgggctgaacggggggttcgtgcacacagcccagcttggagcgaacgacctacaccgaactgagatacctacagcgtgagctatgagaaagcgccacgcttcccgaagggagaaaggcggacaggtatccggtaagcggcagggtcggaacaggagagcgcacgagggagcttccagggggaaacgcctggtatctttatagtcctgtcgggtttcgccacctctgacttgagcgtcgatttttgtgatgctcgtcaggggggcggagcctatggaaaaacgccagcaacgcggcctttttacggttcctggccttttgctggccttttgctcacatgttctttcctgcgttatcccctgattctgctagcttaagcggccgcgattgaccaggaactttgaccagccccttcacttccccaagctctctgaaagtggagggttgatctttccttttgaccacttttgtcgcatcccgtctaagggtggctgatttcactgctgaattaaccaccaagcacccccccaccccctcccccagccaccactttctcaaatactacccttccttttccccctcccttaagacttatttctaatatttctaaagtgcactgttttgggcctctccccatccccgccccccaagtgggctttccttccgccttcctcggctcggattcctgacttggtcgccacccccttctcctcctctcccaccccgcattgtctttctgaaaccgccccctcccggagcaagtccctgcaccctcgcccagaatcccgggctcgcacacactccgcgcaggccgctccccctgcacactcctccctccgtctccccccggcttccccgcccctctcttcctccttctttccctcctccctctcccggcgcccgaaaggatcattgttagccgcccccgccccgcccaccccggctgtttatttatgcacacgtcactgggccggccccgccctccggcatctcattaaggcagtgtgttcctctcgccctgtcaataatctccgctcccagactactccgttcctccggatttcgatccccctttttctatctgtcaatcagcgccgcctttgaactgaaaagctctcagtctaacttcaactcactcaaatccgagcggcacgagcacctcctgtatatctcgagagctcaagcttactagtgtggataaccgtattaccgccatgcat

SEQ ID NO: 43296 - DNA, 5701 bp, ARTIFICIAL SEQUENCE
  vector containing human replication origin
tagttattaatagtaatcaattacggggtcattagttcatagcccatatatggagttccgcgttacataacttacggtaaatggcccgcctggctgaccgcccaacgacccccgcccattgacgtcaataatgacgtatgttcccatagtaacgccaatagggactttccattgacgtcaatgggtggagtatttacggtaaactgcccacttggcagtacatcaagtgtatcatatgccaagtacgccccctattgacgtcaatgacggtaaatggcccgcctggcattatgcccagtacatgaccttatgggactttcctacttggcagtacatctacgtattagtcatcgctattaccatggtgatgcggttttggcagtacatcaatgggcgtggatagcggtttgactcacggggatttccaagtctccaccccattgacgtcaatgggagtttgttttggcaccaaaatcaacgggactttccaaaatgtcgtaacaactccgccccattgacgcaaatgggcggtaggcgtgtacggtgggaggtctatataagcagagctggtttagtgaaccgtcagatccgctagagcatgaccgagtacaagcccacggtgcgcctcgccacccgcgacgacgtcccccgggccgtacgcaccctcgccgccgcgttcgccgactaccccgccacgcgccacaccgtcgacccggaccgccacatcgagcgggtcaccgagctgcaagaactcttcctcacgcgcgtcgggctcgacatcggcaaggtgtgggtcgcggacgacggcgccgcggtggcggtctggaccacgccggagagcgtcgaagcgggggcggtgttcgccgagatcggcccgcgcatggccgagttgagcggttcccggctggccgcgcagcaacagatggaaggcctcctggcgccgcaccggcccaaggagcccgcgtggttcctggccaccgtcggcgtctcgcccgaccaccagggcaagggtctgggcagcgccgtcgtgctccccggagtggaggcggccgagcgcgccggggtgcccgccttcctggagacctccgcgccccgcaacctccccttctacgagcggctcggcttcaccgtcaccgccgacgtcgaggtgcccgaaggaccgcgcacctggtgcatgacccgcaagcccggtgcctagctgattggtctaaaatgagatacatcaacgctcctccatgttttttgttttctttttaaatgaaaaactttattttttaagaggagtttcaggttcatagcaaaattgagaggaaggtacattcaagctgaggaagttttcctctattcctagtttactgagagattgcatcatgaatgggtgttaaattttgtcaaatgctttttctgtgtctatcaatatgaccatgtgattttcttctttaacctgttgatgggacaaattacgttaattgattttcaaacgttgaaccacccttacatatctggaataaattctacttggttgtggtgtatattttttgatacattcttggattctttttgctaatattttgttgaaaatgtttgtatctttgttcatgagagatattggtctgttgttttcttttcttgtaatgtcattttctagttccggtattaaggtaatgctggcctagttgaatgatttaggaagtattccctctgcttctgtcttctgaaagagattgtagaaagttgatacaatttttttttctttaaatatttgatagaattctgcagtgaattctgcagtcgacggtaccgcgggcccgggatccaccggatctagataactgatcataatcagccataccacatttgtagaggttttacttgctttaaaaaacctcccacacctccccctgaacctgaaacataaaatgaatgcaattgttgttgttaacttgtttattgcagcttataatggttacaaataaagcaatagcatcacaaatttcacaaataaagcatttttttcactgcattctagttgtggtttgtccaaactcatcaatgtatcttaacgcgtaaattgtaagcgttaatattttgttaaaattcgcgttaaatttttgttaaatcagctcattttttaaccaataggccgaaatcggcgcggaacccctatttgtttatttttctaaatacattcaaatatgtatccgctcatgagacaataaccctgataaatgcttcaataatattgaaaaaggaagagtcaggatgaggatcgtttcgcatgattgaacaagatggattgcacgcaggttctccggccgcttgggtggagaggctattcggctatgactgggcacaacagacaatcggctgctctgatgccgccgtgttccggctgtcagcgcaggggcgcccggttctttttgtcaagaccgacctgtccggtgccctgaatgaactgcaagacgaggcagcgcggctatcgtggctggccacgacgggcgttccttgcgcagctgtgctcgacgttgtcactgaagcgggaagggactggctgctattgggcgaagtgccggggcaggatctcctgtcatctcaccttgctcctgccgagaaagtatccatcatggctgatgcaatgcggcggctgcatacgcttgatccggctacctgcccattcgaccaccaagcgaaacatcgcatcgagcgagcacgtactcggatggaagccggtcttgtcgatcaggatgatctggacgaagagcatcaggggctcgcgccagccgaactgttcgccaggctcaaggcgagcatgcccgacggcgaggatctcgtcgtgacccatggcgatgcctgcttgccgaatatcatggtggaaaatggccgcttttctggattcatcgactgtggccggctgggtgtggcggaccgctatcaggacatagcgttggctacccgtgatattgctgaagagcttggcggcgaatgggctgaccgcttcctcgtgctttacggtatcgccgctcccgattcgcagcgcatcgccttctatcgccttcttgacgagttcttctgagcgggactctggggttcgaaatgaccgaccaagcgacgcccaacctgccatcacgagatttcgattccaccgccgccttctatgaaaggttgggcttcggaatcgttttccgggacgccggctggatgatcctccagcgcggggatctcatgctggagttcttcgcccaccctagggggaggctaactgaaacacggaaggagacaataccggaaggaacccgcgctatgacggcaataaaaagacagaataaaacgcacggtgttgggtcgtttgttcataaacgcggggttcggtcccagggctggcactctgtcgataccccaccgagaccccattggggccaatacgcccgcgtttcttccttttccccaccccaccccccaagttcgggtgaaggcccagggctcgcagccaacgtcggggcggcaggccctgccatagcctcaggttactcatatatactttagattgatttaaaacttcatttttaatttaaaaggatctaggtgaagatcctttttgataatctcatgaccaaaatcccttaacgtgagttttcgttccactgagcgtcagaccccgtagaaaagatcaaaggatcttcttgagatcctttttttctgcgcgtaatctgctgcttgcaaacaaaaaaaccaccgctaccagcggtggtttgtttgccggatcaagagctaccaactctttttccgaaggtaactggcttcagcagagcgcagataccaaatactgtccttctagtgtagccgtagttaggccaccacttcaagaactctgtagcaccgcctacatacctcgctctgctaatcctgttaccagtggctgctgccagtggcgataagtcgtgtcttaccgggttggactcaagacgatagttaccggataaggcgcagcggtcgggctgaacggggggttcgtgcacacagcccagcttggagcgaacgacctacaccgaactgagatacctacagcgtgagctatgagaaagcgccacgcttcccgaagggagaaaggcggacaggtatccggtaagcggcagggtcggaacaggagagcgcacgagggagcttccagggggaaacgcctggtatctttatagtcctgtcgggtttcgccacctctgacttgagcgtcgatttttgtgatgctcgtcaggggggcggagcctatggaaaaacgccagcaacgcggcctttttacggttcctggccttttgctggccttttgctcacatgttctttcctgcgttatcccctgattctgctagcttaagcggccgcgatttggggagctgccagccccgggcgcagggacgaggacccctacgcctccggcctgccctggaccctcccctcccgggtaccagcgcgccgagcgcctcccgtcgcagcgtctcacccgccgctcagccgcctcagcacacacaggccctgccgcccgccgcagcgccacattgcgcatgacgagcacctggctggcgaggaaccccctcttaacccgacgcagggcgcggggcggggcttgccgtgacagctaccactcctattggtcaacgcgaacagcgacgtcctctgcgataggctgtaggtgaaaagggtaggcctccactgctctgggacgggcgggagggcggtgcggacggagatgggcgggaggggcggggccgacgtgccgaaggaggcgggcaaggcgaggggcgtggtacgggtagaaaggggcggggccgtcttgccgaaaggggcggggttcggccagcagcaggatgtggacagatgataggagggggaagtgggcaggcgagaagtggggcgtggcgagaggcgtgtgtatgcagatgaagtggggcctggtgaagggcggggctgcgctggtgaaaagaggggctcctggaatggcgtgctgtgttgggtggggctgtgcaagtgatgggaggggcttagcgaggggtggctctttgcaggtgaggagtggagaccagtgggagaggggattgcaagtgagctgagccttgggggcggggcttgcaggtgacagggtggagcctagtgggcggggatgcaagtgagctgggccttggggatggggcttgcaggcgatggggtggagcctggtggggcggggctgcaggtgagctgggccttgggggcggggcttgcatgcgagaggtgggtccttgtgggggcagggctggcagaagtgggtggggcttggtgatggaccgcggtgttcaggtgagggtagtggcctggttgggggctgccggaagctgggccaggtgaaacttggtagccctctctggccttggtgtgggcgttggtcctgtttgtagggctgagctgagctccaaaggcgttctgctgccccgccaggcctgaaccttggggtctgggggcttcttggatgagatctcaaggctgcatggcaggtcccagggccagggccccacggtgtcacacgtatcacggatggccgccagcgaagcacagcacagctccgagctgctgcatgggagcctgtggcccccgctgctgcctccgctttcctcttcgtttcgtatctcgagagctcaagcttactagtgtggataaccgtattaccgccatgcat

SEQ ID NO: 43297 - DNA, 5229 bp, ARTIFICIAL SEQUENCE
  vector containing human replication origin
tagttattaatagtaatcaattacggggtcattagttcatagcccatatatggagttccgcgttacataacttacggtaaatggcccgcctggctgaccgcccaacgacccccgcccattgacgtcaataatgacgtatgttcccatagtaacgccaatagggactttccattgacgtcaatgggtggagtatttacggtaaactgcccacttggcagtacatcaagtgtatcatatgccaagtacgccccctattgacgtcaatgacggtaaatggcccgcctggcattatgcccagtacatgaccttatgggactttcctacttggcagtacatctacgtattagtcatcgctattaccatggtgatgcggttttggcagtacatcaatgggcgtggatagcggtttgactcacggggatttccaagtctccaccccattgacgtcaatgggagtttgttttggcaccaaaatcaacgggactttccaaaatgtcgtaacaactccgccccattgacgcaaatgggcggtaggcgtgtacggtgggaggtctatataagcagagctggtttagtgaaccgtcagatccgctagagcatgaccgagtacaagcccacggtgcgcctcgccacccgcgacgacgtcccccgggccgtacgcaccctcgccgccgcgttcgccgactaccccgccacgcgccacaccgtcgacccggaccgccacatcgagcgggtcaccgagctgcaagaactcttcctcacgcgcgtcgggctcgacatcggcaaggtgtgggtcgcggacgacggcgccgcggtggcggtctggaccacgccggagagcgtcgaagcgggggcggtgttcgccgagatcggcccgcgcatggccgagttgagcggttcccggctggccgcgcagcaacagatggaaggcctcctggcgccgcaccggcccaaggagcccgcgtggttcctggccaccgtcggcgtctcgcccgaccaccagggcaagggtctgggcagcgccgtcgtgctccccggagtggaggcggccgagcgcgccggggtgcccgccttcctggagacctccgcgccccgcaacctccccttctacgagcggctcggcttcaccgtcaccgccgacgtcgaggtgcccgaaggaccgcgcacctggtgcatgacccgcaagcccggtgcctagctgattggtctaaaatgagatacatcaacgctcctccatgttttttgttttctttttaaatgaaaaactttattttttaagaggagtttcaggttcatagcaaaattgagaggaaggtacattcaagctgaggaagttttcctctattcctagtttactgagagattgcatcatgaatgggtgttaaattttgtcaaatgctttttctgtgtctatcaatatgaccatgtgattttcttctttaacctgttgatgggacaaattacgttaattgattttcaaacgttgaaccacccttacatatctggaataaattctacttggttgtggtgtatattttttgatacattcttggattctttttgctaatattttgttgaaaatgtttgtatctttgttcatgagagatattggtctgttgttttcttttcttgtaatgtcattttctagttccggtattaaggtaatgctggcctagttgaatgatttaggaagtattccctctgcttctgtcttctgaaagagattgtagaaagttgatacaatttttttttctttaaatatttgatagaattctgcagtgaattctgcagtcgacggtaccgcgggcccgggatccaccggatctagataactgatcataatcagccataccacatttgtagaggttttacttgctttaaaaaacctcccacacctccccctgaacctgaaacataaaatgaatgcaattgttgttgttaacttgtttattgcagcttataatggttacaaataaagcaatagcatcacaaatttcacaaataaagcatttttttcactgcattctagttgtggtttgtccaaactcatcaatgtatcttaacgcgtaaattgtaagcgttaatattttgttaaaattcgcgttaaatttttgttaaatcagctcattttttaaccaataggccgaaatcggcgcggaacccctatttgtttatttttctaaatacattcaaatatgtatccgctcatgagacaataaccctgataaatgcttcaataatattgaaaaaggaagagtcaggatgaggatcgtttcgcatgattgaacaagatggattgcacgcaggttctccggccgcttgggtggagaggctattcggctatgactgggcacaacagacaatcggctgctctgatgccgccgtgttccggctgtcagcgcaggggcgcccggttctttttgtcaagaccgacctgtccggtgccctgaatgaactgcaagacgaggcagcgcggctatcgtggctggccacgacgggcgttccttgcgcagctgtgctcgacgttgtcactgaagcgggaagggactggctgctattgggcgaagtgccggggcaggatctcctgtcatctcaccttgctcctgccgagaaagtatccatcatggctgatgcaatgcggcggctgcatacgcttgatccggctacctgcccattcgaccaccaagcgaaacatcgcatcgagcgagcacgtactcggatggaagccggtcttgtcgatcaggatgatctggacgaagagcatcaggggctcgcgccagccgaactgttcgccaggctcaaggcgagcatgcccgacggcgaggatctcgtcgtgacccatggcgatgcctgcttgccgaatatcatggtggaaaatggccgcttttctggattcatcgactgtggccggctgggtgtggcggaccgctatcaggacatagcgttggctacccgtgatattgctgaagagcttggcggcgaatgggctgaccgcttcctcgtgctttacggtatcgccgctcccgattcgcagcgcatcgccttctatcgccttcttgacgagttcttctgagcgggactctggggttcgaaatgaccgaccaagcgacgcccaacctgccatcacgagatttcgattccaccgccgccttctatgaaaggttgggcttcggaatcgttttccgggacgccggctggatgatcctccagcgcggggatctcatgctggagttcttcgcccaccctagggggaggctaactgaaacacggaaggagacaataccggaaggaacccgcgctatgacggcaataaaaagacagaataaaacgcacggtgttgggtcgtttgttcataaacgcggggttcggtcccagggctggcactctgtcgataccccaccgagaccccattggggccaatacgcccgcgtttcttccttttccccaccccaccccccaagttcgggtgaaggcccagggctcgcagccaacgtcggggcggcaggccctgccatagcctcaggttactcatatatactttagattgatttaaaacttcatttttaatttaaaaggatctaggtgaagatcctttttgataatctcatgaccaaaatcccttaacgtgagttttcgttccactgagcgtcagaccccgtagaaaagatcaaaggatcttcttgagatcctttttttctgcgcgtaatctgctgcttgcaaacaaaaaaaccaccgctaccagcggtggtttgtttgccggatcaagagctaccaactctttttccgaaggtaactggcttcagcagagcgcagataccaaatactgtccttctagtgtagccgtagttaggccaccacttcaagaactctgtagcaccgcctacatacctcgctctgctaatcctgttaccagtggctgctgccagtggcgataagtcgtgtcttaccgggttggactcaagacgatagttaccggataaggcgcagcggtcgggctgaacggggggttcgtgcacacagcccagcttggagcgaacgacctacaccgaactgagatacctacagcgtgagctatgagaaagcgccacgcttcccgaagggagaaaggcggacaggtatccggtaagcggcagggtcggaacaggagagcgcacgagggagcttccagggggaaacgcctggtatctttatagtcctgtcgggtttcgccacctctgacttgagcgtcgatttttgtgatgctcgtcaggggggcggagcctatggaaaaacgccagcaacgcggcctttttacggttcctggccttttgctggccttttgctcacatgttctttcctgcgttatcccctgattctgctagcttaagcggccgcgatgcttcccactcttactttgaatcacttttttcctcttcattgctataatgacaccaaggaatggaagacacttgtgtaggtcttccccgtcccatccacttcctccccatcactttcctccagtgttgaaacatgactggtctaaactactctttaggaaaaacaaacaaaagcaaccactcttggccagtccctagacactgggtctttcccaccacccctgactcctcccacaagccttggtccctcccactagccatgaatcctcccaccatcctcggcccttcccaccacccctggcccttcccaccatcctcggcccttcctaccagccccgtctcctccaccagcctcagcccctcccaccacccgtggctctgcccaccatccttgtcccctcccaccagccccagaccctcccaccaaccctagctcctcccactacccctggctcctcccaggatcctctgcccctcccaccagccctgggccctcccaccaccctcagcccctcccaccaccctcagcccctcccaccaccctcagcccctcccaccagccctggtccctgtgtgccagcacaactcactttgctgctggtgagcacggtccccttcaggacctctaacctggtctttggaccctgcttctcggaaccatggcccttacaaggtggaggtagagacctccccttcctcgacagtcccccaccttttgatcgccacctcgaaaggaagtagaggtctagctgctcaaaggtttgggaggctgggaggcggtgaaatgcctgcagcatgcagatctcgagagctcaagcttactagtgtggataaccgtattaccgccatgcat

SEQ ID NO: 43298 - DNA, 5279 bp, ARTIFICIAL SEQUENCE
  vector containing human replication origin
tagttattaatagtaatcaattacggggtcattagttcatagcccatatatggagttccgcgttacataacttacggtaaatggcccgcctggctgaccgcccaacgacccccgcccattgacgtcaataatgacgtatgttcccatagtaacgccaatagggactttccattgacgtcaatgggtggagtatttacggtaaactgcccacttggcagtacatcaagtgtatcatatgccaagtacgccccctattgacgtcaatgacggtaaatggcccgcctggcattatgcccagtacatgaccttatgggactttcctacttggcagtacatctacgtattagtcatcgctattaccatggtgatgcggttttggcagtacatcaatgggcgtggatagcggtttgactcacggggatttccaagtctccaccccattgacgtcaatgggagtttgttttggcaccaaaatcaacgggactttccaaaatgtcgtaacaactccgccccattgacgcaaatgggcggtaggcgtgtacggtgggaggtctatataagcagagctggtttagtgaaccgtcagatccgctagagcatgaccgagtacaagcccacggtgcgcctcgccacccgcgacgacgtcccccgggccgtacgcaccctcgccgccgcgttcgccgactaccccgccacgcgccacaccgtcgacccggaccgccacatcgagcgggtcaccgagctgcaagaactcttcctcacgcgcgtcgggctcgacatcggcaaggtgtgggtcgcggacgacggcgccgcggtggcggtctggaccacgccggagagcgtcgaagcgggggcggtgttcgccgagatcggcccgcgcatggccgagttgagcggttcccggctggccgcgcagcaacagatggaaggcctcctggcgccgcaccggcccaaggagcccgcgtggttcctggccaccgtcggcgtctcgcccgaccaccagggcaagggtctgggcagcgccgtcgtgctccccggagtggaggcggccgagcgcgccggggtgcccgccttcctggagacctccgcgccccgcaacctccccttctacgagcggctcggcttcaccgtcaccgccgacgtcgaggtgcccgaaggaccgcgcacctggtgcatgacccgcaagcccggtgcctagctgattggtctaaaatgagatacatcaacgctcctccatgttttttgttttctttttaaatgaaaaactttattttttaagaggagtttcaggttcatagcaaaattgagaggaaggtacattcaagctgaggaagttttcctctattcctagtttactgagagattgcatcatgaatgggtgttaaattttgtcaaatgctttttctgtgtctatcaatatgaccatgtgattttcttctttaacctgttgatgggacaaattacgttaattgattttcaaacgttgaaccacccttacatatctggaataaattctacttggttgtggtgtatattttttgatacattcttggattctttttgctaatattttgttgaaaatgtttgtatctttgttcatgagagatattggtctgttgttttcttttcttgtaatgtcattttctagttccggtattaaggtaatgctggcctagttgaatgatttaggaagtattccctctgcttctgtcttctgaaagagattgtagaaagttgatacaatttttttttctttaaatatttgatagaattctgcagtgaattctgcagtcgacggtaccgcgggcccgggatccaccggatctagataactgatcataatcagccataccacatttgtagaggttttacttgctttaaaaaacctcccacacctccccctgaacctgaaacataaaatgaatgcaattgttgttgttaacttgtttattgcagcttataatggttacaaataaagcaatagcatcacaaatttcacaaataaagcatttttttcactgcattctagttgtggtttgtccaaactcatcaatgtatcttaacgcgtaaattgtaagcgttaatattttgttaaaattcgcgttaaatttttgttaaatcagctcattttttaaccaataggccgaaatcggcgcggaacccctatttgtttatttttctaaatacattcaaatatgtatccgctcatgagacaataaccctgataaatgcttcaataatattgaaaaaggaagagtcaggatgaggatcgtttcgcatgattgaacaagatggattgcacgcaggttctccggccgcttgggtggagaggctattcggctatgactgggcacaacagacaatcggctgctctgatgccgccgtgttccggctgtcagcgcaggggcgcccggttctttttgtcaagaccgacctgtccggtgccctgaatgaactgcaagacgaggcagcgcggctatcgtggctggccacgacgggcgttccttgcgcagctgtgctcgacgttgtcactgaagcgggaagggactggctgctattgggcgaagtgccggggcaggatctcctgtcatctcaccttgctcctgccgagaaagtatccatcatggctgatgcaatgcggcggctgcatacgcttgatccggctacctgcccattcgaccaccaagcgaaacatcgcatcgagcgagcacgtactcggatggaagccggtcttgtcgatcaggatgatctggacgaagagcatcaggggctcgcgccagccgaactgttcgccaggctcaaggcgagcatgcccgacggcgaggatctcgtcgtgacccatggcgatgcctgcttgccgaatatcatggtggaaaatggccgcttttctggattcatcgactgtggccggctgggtgtggcggaccgctatcaggacatagcgttggctacccgtgatattgctgaagagcttggcggcgaatgggctgaccgcttcctcgtgctttacggtatcgccgctcccgattcgcagcgcatcgccttctatcgccttcttgacgagttcttctgagcgggactctggggttcgaaatgaccgaccaagcgacgcccaacctgccatcacgagatttcgattccaccgccgccttctatgaaaggttgggcttcggaatcgttttccgggacgccggctggatgatcctccagcgcggggatctcatgctggagttcttcgcccaccctagggggaggctaactgaaacacggaaggagacaataccggaaggaacccgcgctatgacggcaataaaaagacagaataaaacgcacggtgttgggtcgtttgttcataaacgcggggttcggtcccagggctggcactctgtcgataccccaccgagaccccattggggccaatacgcccgcgtttcttccttttccccaccccaccccccaagttcgggtgaaggcccagggctcgcagccaacgtcggggcggcaggccctgccatagcctcaggttactcatatatactttagattgatttaaaacttcatttttaatttaaaaggatctaggtgaagatcctttttgataatctcatgaccaaaatcccttaacgtgagttttcgttccactgagcgtcagaccccgtagaaaagatcaaaggatcttcttgagatcctttttttctgcgcgtaatctgctgcttgcaaacaaaaaaaccaccgctaccagcggtggtttgtttgccggatcaagagctaccaactctttttccgaaggtaactggcttcagcagagcgcagataccaaatactgtccttctagtgtagccgtagttaggccaccacttcaagaactctgtagcaccgcctacatacctcgctctgctaatcctgttaccagtggctgctgccagtggcgataagtcgtgtcttaccgggttggactcaagacgatagttaccggataaggcgcagcggtcgggctgaacggggggttcgtgcacacagcccagcttggagcgaacgacctacaccgaactgagatacctacagcgtgagctatgagaaagcgccacgcttcccgaagggagaaaggcggacaggtatccggtaagcggcagggtcggaacaggagagcgcacgagggagcttccagggggaaacgcctggtatctttatagtcctgtcgggtttcgccacctctgacttgagcgtcgatttttgtgatgctcgtcaggggggcggagcctatggaaaaacgccagcaacgcggcctttttacggttcctggccttttgctggccttttgctcacatgttctttcctgcgttatcccctgattctgctagcttaagcggccgcgatgcagcggccggtttgcttctaaaccgagccctccaatacagcatgtccctgccgccccctatagggccgcctcgtaccctataacctccaccatcatccccctaagtccttgccgcccccttcggcctcatattccctcatcttcgataaagctactccgagtacttagcctgttcctcctgccgaccctgctgcgcaccacattcctatattcgcctcctctcaggcgctcccaccccacacagctgccgaccgccttcctccccaggcccggccaggccttaggcctccgcccgagagtcccccagagccggcccggggggctccccacagcccccaaagcaccgctgacctcgaccccaccacctcaccccaagcctcgcgactcgggcccgtgtcctaccaacgaggccactcccgctcggcaccctcggtcctttattgttgactcgaagctcccaaaatggcggacgctccttcctcctcggaaacctccgcccgcccccacccagccctctcgctacggcctcctctcgcccccgcccccgccccgctccgaggggcgcgcaggccagccgcccgagccgccggctcccccggctgtccagccctacctcctccgctgcccgctctcgtggcgccgccgaagtcgccgcctggctgagctaactcggctcctctgccccctccctcgctcgcccgttcgcccgcccgccgcctcctccctctttccctgcctctccgcatggcggcgaccgcggctcctcctccactcaagatggcgaaacctcggccgccgcggctatattcgccgcggcgtcactgccttcctggcctggtggtgagaggaatctcgagagctcaagcttactagtgtggataaccgtattaccgccatgcat

SEQ ID NO: 43299 - DNA, 5679 bp, ARTIFICIAL SEQUENCE
  vector containing human replication origin
tagttattaatagtaatcaattacggggtcattagttcatagcccatatatggagttccgcgttacataacttacggtaaatggcccgcctggctgaccgcccaacgacccccgcccattgacgtcaataatgacgtatgttcccatagtaacgccaatagggactttccattgacgtcaatgggtggagtatttacggtaaactgcccacttggcagtacatcaagtgtatcatatgccaagtacgccccctattgacgtcaatgacggtaaatggcccgcctggcattatgcccagtacatgaccttatgggactttcctacttggcagtacatctacgtattagtcatcgctattaccatggtgatgcggttttggcagtacatcaatgggcgtggatagcggtttgactcacggggatttccaagtctccaccccattgacgtcaatgggagtttgttttggcaccaaaatcaacgggactttccaaaatgtcgtaacaactccgccccattgacgcaaatgggcggtaggcgtgtacggtgggaggtctatataagcagagctggtttagtgaaccgtcagatccgctagagcatgaccgagtacaagcccacggtgcgcctcgccacccgcgacgacgtcccccgggccgtacgcaccctcgccgccgcgttcgccgactaccccgccacgcgccacaccgtcgacccggaccgccacatcgagcgggtcaccgagctgcaagaactcttcctcacgcgcgtcgggctcgacatcggcaaggtgtgggtcgcggacgacggcgccgcggtggcggtctggaccacgccggagagcgtcgaagcgggggcggtgttcgccgagatcggcccgcgcatggccgagttgagcggttcccggctggccgcgcagcaacagatggaaggcctcctggcgccgcaccggcccaaggagcccgcgtggttcctggccaccgtcggcgtctcgcccgaccaccagggcaagggtctgggcagcgccgtcgtgctccccggagtggaggcggccgagcgcgccggggtgcccgccttcctggagacctccgcgccccgcaacctccccttctacgagcggctcggcttcaccgtcaccgccgacgtcgaggtgcccgaaggaccgcgcacctggtgcatgacccgcaagcccggtgcctagctgattggtctaaaatgagatacatcaacgctcctccatgttttttgttttctttttaaatgaaaaactttattttttaagaggagtttcaggttcatagcaaaattgagaggaaggtacattcaagctgaggaagttttcctctattcctagtttactgagagattgcatcatgaatgggtgttaaattttgtcaaatgctttttctgtgtctatcaatatgaccatgtgattttcttctttaacctgttgatgggacaaattacgttaattgattttcaaacgttgaaccacccttacatatctggaataaattctacttggttgtggtgtatattttttgatacattcttggattctttttgctaatattttgttgaaaatgtttgtatctttgttcatgagagatattggtctgttgttttcttttcttgtaatgtcattttctagttccggtattaaggtaatgctggcctagttgaatgatttaggaagtattccctctgcttctgtcttctgaaagagattgtagaaagttgatacaatttttttttctttaaatatttgatagaattctgcagtgaattctgcagtcgacggtaccgcgggcccgggatccaccggatctagataactgatcataatcagccataccacatttgtagaggttttacttgctttaaaaaacctcccacacctccccctgaacctgaaacataaaatgaatgcaattgttgttgttaacttgtttattgcagcttataatggttacaaataaagcaatagcatcacaaatttcacaaataaagcatttttttcactgcattctagttgtggtttgtccaaactcatcaatgtatcttaacgcgtaaattgtaagcgttaatattttgttaaaattcgcgttaaatttttgttaaatcagctcattttttaaccaataggccgaaatcggcgcggaacccctatttgtttatttttctaaatacattcaaatatgtatccgctcatgagacaataaccctgataaatgcttcaataatattgaaaaaggaagagtcaggatgaggatcgtttcgcatgattgaacaagatggattgcacgcaggttctccggccgcttgggtggagaggctattcggctatgactgggcacaacagacaatcggctgctctgatgccgccgtgttccggctgtcagcgcaggggcgcccggttctttttgtcaagaccgacctgtccggtgccctgaatgaactgcaagacgaggcagcgcggctatcgtggctggccacgacgggcgttccttgcgcagctgtgctcgacgttgtcactgaagcgggaagggactggctgctattgggcgaagtgccggggcaggatctcctgtcatctcaccttgctcctgccgagaaagtatccatcatggctgatgcaatgcggcggctgcatacgcttgatccggctacctgcccattcgaccaccaagcgaaacatcgcatcgagcgagcacgtactcggatggaagccggtcttgtcgatcaggatgatctggacgaagagcatcaggggctcgcgccagccgaactgttcgccaggctcaaggcgagcatgcccgacggcgaggatctcgtcgtgacccatggcgatgcctgcttgccgaatatcatggtggaaaatggccgcttttctggattcatcgactgtggccggctgggtgtggcggaccgctatcaggacatagcgttggctacccgtgatattgctgaagagcttggcggcgaatgggctgaccgcttcctcgtgctttacggtatcgccgctcccgattcgcagcgcatcgccttctatcgccttcttgacgagttcttctgagcgggactctggggttcgaaatgaccgaccaagcgacgcccaacctgccatcacgagatttcgattccaccgccgccttctatgaaaggttgggcttcggaatcgttttccgggacgccggctggatgatcctccagcgcggggatctcatgctggagttcttcgcccaccctagggggaggctaactgaaacacggaaggagacaataccggaaggaacccgcgctatgacggcaataaaaagacagaataaaacgcacggtgttgggtcgtttgttcataaacgcggggttcggtcccagggctggcactctgtcgataccccaccgagaccccattggggccaatacgcccgcgtttcttccttttccccaccccaccccccaagttcgggtgaaggcccagggctcgcagccaacgtcggggcggcaggccctgccatagcctcaggttactcatatatactttagattgatttaaaacttcatttttaatttaaaaggatctaggtgaagatcctttttgataatctcatgaccaaaatcccttaacgtgagttttcgttccactgagcgtcagaccccgtagaaaagatcaaaggatcttcttgagatcctttttttctgcgcgtaatctgctgcttgcaaacaaaaaaaccaccgctaccagcggtggtttgtttgccggatcaagagctaccaactctttttccgaaggtaactggcttcagcagagcgcagataccaaatactgtccttctagtgtagccgtagttaggccaccacttcaagaactctgtagcaccgcctacatacctcgctctgctaatcctgttaccagtggctgctgccagtggcgataagtcgtgtcttaccgggttggactcaagacgatagttaccggataaggcgcagcggtcgggctgaacggggggttcgtgcacacagcccagcttggagcgaacgacctacaccgaactgagatacctacagcgtgagctatgagaaagcgccacgcttcccgaagggagaaaggcggacaggtatccggtaagcggcagggtcggaacaggagagcgcacgagggagcttccagggggaaacgcctggtatctttatagtcctgtcgggtttcgccacctctgacttgagcgtcgatttttgtgatgctcgtcaggggggcggagcctatggaaaaacgccagcaacgcggcctttttacggttcctggccttttgctggccttttgctcacatgttctttcctgcgttatcccctgattctgctagcttaagcggccgcgatcaagcaaagcgttgacccggctacccctgagcagcgccctacgctgggttccactccacttcccctcccccgcgcggggcgatagccaggcgcggtcccttcccacgcgggccgcggcgagtgcggacagctcccttccgggctgcggaaggcgggaagtctgcggttcgcgggctccggctggcgggcgcccctcggagtccctgaagtcggccgggccccgcaggacccgcgccttctcggccccaactgtccctcgcgaagcgtcctgcggtggcggaggcctcgcggccgcccgccagccccgcgagcggcaagcgcggggctcagaggggaggcggggcaaggccgcggggcggaggggggcgggaggtgcatcctgggaaatccaccaacatggggcgcagcggccgccgccgccgccgccgtcgccgcgagtcccggccgcgggtgcctccgcttccctgacgcccagctggggcctcgccgcccgccgcggcccgggtctttgcggcccagactcgccagcgcgcccttctcccgcctgctcgccggggccatgtgagggggcagctccctccaccgccgccgccccctcttcctcccccgccccctctccctgcccgcccccgtcacacggagccctggaggatcccccgctgctgcccgccctccctacgccacccccacgatggacaggaactacgcgacctcgggcttcaccgagccgccgccgccgccgccgcccgcgccccccgccgcccccgtccccgccagcgccgctgcgcagccccccgccccagcctgggcgtacgaaccccgagccgccgccgccgccgccagcagcagctgcagcagtggcagctgcagtagcggcagcagccccagcctcaaggccaggtagggagggtgggcggcggggtcgcggtggaccaggaaaggccggggatgcgtttggggccttcgctcggttgcagcgccgcccagaggtctgggccgggcggggagccctccgctcgccctcggccagctcgggggaggcggctgatgactcctacggggtggtcgcgggtaggtgggggcgcccggtgcaggattcgcgcctggggacggcgggtgaaggaatagctgggcgggagtcgtggggctccgtcacctcttgggtcctgggctctcacatggtgaagtttgggctcgtggctgaactcgggatctgtgagacccaggattggcgccgggggtccgaagggatctcgagagctcaagcttactagtgtggataaccgtattaccgccatgcat

SEQ ID NO: 43300 - DNA, 5429 bp, ARTIFICIAL SEQUENCE
  vector containing human replication origin
tagttattaatagtaatcaattacggggtcattagttcatagcccatatatggagttccgcgttacataacttacggtaaatggcccgcctggctgaccgcccaacgacccccgcccattgacgtcaataatgacgtatgttcccatagtaacgccaatagggactttccattgacgtcaatgggtggagtatttacggtaaactgcccacttggcagtacatcaagtgtatcatatgccaagtacgccccctattgacgtcaatgacggtaaatggcccgcctggcattatgcccagtacatgaccttatgggactttcctacttggcagtacatctacgtattagtcatcgctattaccatggtgatgcggttttggcagtacatcaatgggcgtggatagcggtttgactcacggggatttccaagtctccaccccattgacgtcaatgggagtttgttttggcaccaaaatcaacgggactttccaaaatgtcgtaacaactccgccccattgacgcaaatgggcggtaggcgtgtacggtgggaggtctatataagcagagctggtttagtgaaccgtcagatccgctagagcatgaccgagtacaagcccacggtgcgcctcgccacccgcgacgacgtcccccgggccgtacgcaccctcgccgccgcgttcgccgactaccccgccacgcgccacaccgtcgacccggaccgccacatcgagcgggtcaccgagctgcaagaactcttcctcacgcgcgtcgggctcgacatcggcaaggtgtgggtcgcggacgacggcgccgcggtggcggtctggaccacgccggagagcgtcgaagcgggggcggtgttcgccgagatcggcccgcgcatggccgagttgagcggttcccggctggccgcgcagcaacagatggaaggcctcctggcgccgcaccggcccaaggagcccgcgtggttcctggccaccgtcggcgtctcgcccgaccaccagggcaagggtctgggcagcgccgtcgtgctccccggagtggaggcggccgagcgcgccggggtgcccgccttcctggagacctccgcgccccgcaacctccccttctacgagcggctcggcttcaccgtcaccgccgacgtcgaggtgcccgaaggaccgcgcacctggtgcatgacccgcaagcccggtgcctagctgattggtctaaaatgagatacatcaacgctcctccatgttttttgttttctttttaaatgaaaaactttattttttaagaggagtttcaggttcatagcaaaattgagaggaaggtacattcaagctgaggaagttttcctctattcctagtttactgagagattgcatcatgaatgggtgttaaattttgtcaaatgctttttctgtgtctatcaatatgaccatgtgattttcttctttaacctgttgatgggacaaattacgttaattgattttcaaacgttgaaccacccttacatatctggaataaattctacttggttgtggtgtatattttttgatacattcttggattctttttgctaatattttgttgaaaatgtttgtatctttgttcatgagagatattggtctgttgttttcttttcttgtaatgtcattttctagttccggtattaaggtaatgctggcctagttgaatgatttaggaagtattccctctgcttctgtcttctgaaagagattgtagaaagttgatacaatttttttttctttaaatatttgatagaattctgcagtgaattctgcagtcgacggtaccgcgggcccgggatccaccggatctagataactgatcataatcagccataccacatttgtagaggttttacttgctttaaaaaacctcccacacctccccctgaacctgaaacataaaatgaatgcaattgttgttgttaacttgtttattgcagcttataatggttacaaataaagcaatagcatcacaaatttcacaaataaagcatttttttcactgcattctagttgtggtttgtccaaactcatcaatgtatcttaacgcgtaaattgtaagcgttaatattttgttaaaattcgcgttaaatttttgttaaatcagctcattttttaaccaataggccgaaatcggcgcggaacccctatttgtttatttttctaaatacattcaaatatgtatccgctcatgagacaataaccctgataaatgcttcaataatattgaaaaaggaagagtcaggatgaggatcgtttcgcatgattgaacaagatggattgcacgcaggttctccggccgcttgggtggagaggctattcggctatgactgggcacaacagacaatcggctgctctgatgccgccgtgttccggctgtcagcgcaggggcgcccggttctttttgtcaagaccgacctgtccggtgccctgaatgaactgcaagacgaggcagcgcggctatcgtggctggccacgacgggcgttccttgcgcagctgtgctcgacgttgtcactgaagcgggaagggactggctgctattgggcgaagtgccggggcaggatctcctgtcatctcaccttgctcctgccgagaaagtatccatcatggctgatgcaatgcggcggctgcatacgcttgatccggctacctgcccattcgaccaccaagcgaaacatcgcatcgagcgagcacgtactcggatggaagccggtcttgtcgatcaggatgatctggacgaagagcatcaggggctcgcgccagccgaactgttcgccaggctcaaggcgagcatgcccgacggcgaggatctcgtcgtgacccatggcgatgcctgcttgccgaatatcatggtggaaaatggccgcttttctggattcatcgactgtggccggctgggtgtggcggaccgctatcaggacatagcgttggctacccgtgatattgctgaagagcttggcggcgaatgggctgaccgcttcctcgtgctttacggtatcgccgctcccgattcgcagcgcatcgccttctatcgccttcttgacgagttcttctgagcgggactctggggttcgaaatgaccgaccaagcgacgcccaacctgccatcacgagatttcgattccaccgccgccttctatgaaaggttgggcttcggaatcgttttccgggacgccggctggatgatcctccagcgcggggatctcatgctggagttcttcgcccaccctagggggaggctaactgaaacacggaaggagacaataccggaaggaacccgcgctatgacggcaataaaaagacagaataaaacgcacggtgttgggtcgtttgttcataaacgcggggttcggtcccagggctggcactctgtcgataccccaccgagaccccattggggccaatacgcccgcgtttcttccttttccccaccccaccccccaagttcgggtgaaggcccagggctcgcagccaacgtcggggcggcaggccctgccatagcctcaggttactcatatatactttagattgatttaaaacttcatttttaatttaaaaggatctaggtgaagatcctttttgataatctcatgaccaaaatcccttaacgtgagttttcgttccactgagcgtcagaccccgtagaaaagatcaaaggatcttcttgagatcctttttttctgcgcgtaatctgctgcttgcaaacaaaaaaaccaccgctaccagcggtggtttgtttgccggatcaagagctaccaactctttttccgaaggtaactggcttcagcagagcgcagataccaaatactgtccttctagtgtagccgtagttaggccaccacttcaagaactctgtagcaccgcctacatacctcgctctgctaatcctgttaccagtggctgctgccagtggcgataagtcgtgtcttaccgggttggactcaagacgatagttaccggataaggcgcagcggtcgggctgaacggggggttcgtgcacacagcccagcttggagcgaacgacctacaccgaactgagatacctacagcgtgagctatgagaaagcgccacgcttcccgaagggagaaaggcggacaggtatccggtaagcggcagggtcggaacaggagagcgcacgagggagcttccagggggaaacgcctggtatctttatagtcctgtcgggtttcgccacctctgacttgagcgtcgatttttgtgatgctcgtcaggggggcggagcctatggaaaaacgccagcaacgcggcctttttacggttcctggccttttgctggccttttgctcacatgttctttcctgcgttatcccctgattctgctagcttaagcggccgcgatccgtcacatggcggtgggcgcgggcggagacgcgcgggggcggggcgcaggggaaacggagggggggtgcggacgggataaaaacggtggggggcagctgagggaaaagatggaaaatcggggaggcggtacgctgacgggataaaagctgaggggttgctcaggggaaacgggggcggggaagacgcgcgaaccagataaaaatggggcaggggtggggggagctgagcggaaacggggtggggcgcgaacgggataaaacccaggggttgtgcggggtcctgaggggaaccagcgccggataaaaacggggaagggagggaggtgaacagagctgagggaaaccgggaaaaggggagcgatagaaaccggagtaggggaagccgggctcaggggaaaagggggtgttggagagtggtagagccgggctgagagaaaaaccaagcaggggaagcggcgatccggggagaacggagagagggagaccgagggctgtgggggtaaggggaaccaaaggggctgaagcgaaatcgaggggaggggcaggtgaaaatggagccatgcgaaggccgatgaggggggaaacgggtaaaaatgggggcgggagaaataggttggagggaatactggccgagaagaaacctggggagagctgggcttaggggaaaatggggagggggtggaaggaaggtgtaataaccgggtgctggggaggacgtaagaattggggggtgcggcgagggtcaaggctagggtaaaacaaggggggctactcaatggctccggtaatgggagagggaagtgaggagaacacggggcggtggggagaggagggcagggtgaaaaccggagtgggggtgggaacgagataaaaaacggggcaggagcgattcggaagaagactgtccccttacctacctacggcgacagcctcgcctgtccccgtccccctgagaaacctgctctccctgtctacccgcatagcctcaagaaatggctcatctcgagagctcaagcttactagtgtggataaccgtattaccgccatgcat

SEQ ID NO: 43301 - DNA, 5638 bp, ARTIFICIAL SEQUENCE
  vector containing human replication origin
tagttattaatagtaatcaattacggggtcattagttcatagcccatatatggagttccgcgttacataacttacggtaaatggcccgcctggctgaccgcccaacgacccccgcccattgacgtcaataatgacgtatgttcccatagtaacgccaatagggactttccattgacgtcaatgggtggagtatttacggtaaactgcccacttggcagtacatcaagtgtatcatatgccaagtacgccccctattgacgtcaatgacggtaaatggcccgcctggcattatgcccagtacatgaccttatgggactttcctacttggcagtacatctacgtattagtcatcgctattaccatggtgatgcggttttggcagtacatcaatgggcgtggatagcggtttgactcacggggatttccaagtctccaccccattgacgtcaatgggagtttgttttggcaccaaaatcaacgggactttccaaaatgtcgtaacaactccgccccattgacgcaaatgggcggtaggcgtgtacggtgggaggtctatataagcagagctggtttagtgaaccgtcagatccgctagagcatgaccgagtacaagcccacggtgcgcctcgccacccgcgacgacgtcccccgggccgtacgcaccctcgccgccgcgttcgccgactaccccgccacgcgccacaccgtcgacccggaccgccacatcgagcgggtcaccgagctgcaagaactcttcctcacgcgcgtcgggctcgacatcggcaaggtgtgggtcgcggacgacggcgccgcggtggcggtctggaccacgccggagagcgtcgaagcgggggcggtgttcgccgagatcggcccgcgcatggccgagttgagcggttcccggctggccgcgcagcaacagatggaaggcctcctggcgccgcaccggcccaaggagcccgcgtggttcctggccaccgtcggcgtctcgcccgaccaccagggcaagggtctgggcagcgccgtcgtgctccccggagtggaggcggccgagcgcgccggggtgcccgccttcctggagacctccgcgccccgcaacctccccttctacgagcggctcggcttcaccgtcaccgccgacgtcgaggtgcccgaaggaccgcgcacctggtgcatgacccgcaagcccggtgcctagctgattggtctaaaatgagatacatcaacgctcctccatgttttttgttttctttttaaatgaaaaactttattttttaagaggagtttcaggttcatagcaaaattgagaggaaggtacattcaagctgaggaagttttcctctattcctagtttactgagagattgcatcatgaatgggtgttaaattttgtcaaatgctttttctgtgtctatcaatatgaccatgtgattttcttctttaacctgttgatgggacaaattacgttaattgattttcaaacgttgaaccacccttacatatctggaataaattctacttggttgtggtgtatattttttgatacattcttggattctttttgctaatattttgttgaaaatgtttgtatctttgttcatgagagatattggtctgttgttttcttttcttgtaatgtcattttctagttccggtattaaggtaatgctggcctagttgaatgatttaggaagtattccctctgcttctgtcttctgaaagagattgtagaaagttgatacaatttttttttctttaaatatttgatagaattctgcagtgaattctgcagtcgacggtaccgcgggcccgggatccaccggatctagataactgatcataatcagccataccacatttgtagaggttttacttgctttaaaaaacctcccacacctccccctgaacctgaaacataaaatgaatgcaattgttgttgttaacttgtttattgcagcttataatggttacaaataaagcaatagcatcacaaatttcacaaataaagcatttttttcactgcattctagttgtggtttgtccaaactcatcaatgtatcttaacgcgtaaattgtaagcgttaatattttgttaaaattcgcgttaaatttttgttaaatcagctcattttttaaccaataggccgaaatcggcgcggaacccctatttgtttatttttctaaatacattcaaatatgtatccgctcatgagacaataaccctgataaatgcttcaataatattgaaaaaggaagagtcaggatgaggatcgtttcgcatgattgaacaagatggattgcacgcaggttctccggccgcttgggtggagaggctattcggctatgactgggcacaacagacaatcggctgctctgatgccgccgtgttccggctgtcagcgcaggggcgcccggttctttttgtcaagaccgacctgtccggtgccctgaatgaactgcaagacgaggcagcgcggctatcgtggctggccacgacgggcgttccttgcgcagctgtgctcgacgttgtcactgaagcgggaagggactggctgctattgggcgaagtgccggggcaggatctcctgtcatctcaccttgctcctgccgagaaagtatccatcatggctgatgcaatgcggcggctgcatacgcttgatccggctacctgcccattcgaccaccaagcgaaacatcgcatcgagcgagcacgtactcggatggaagccggtcttgtcgatcaggatgatctggacgaagagcatcaggggctcgcgccagccgaactgttcgccaggctcaaggcgagcatgcccgacggcgaggatctcgtcgtgacccatggcgatgcctgcttgccgaatatcatggtggaaaatggccgcttttctggattcatcgactgtggccggctgggtgtggcggaccgctatcaggacatagcgttggctacccgtgatattgctgaagagcttggcggcgaatgggctgaccgcttcctcgtgctttacggtatcgccgctcccgattcgcagcgcatcgccttctatcgccttcttgacgagttcttctgagcgggactctggggttcgaaatgaccgaccaagcgacgcccaacctgccatcacgagatttcgattccaccgccgccttctatgaaaggttgggcttcggaatcgttttccgggacgccggctggatgatcctccagcgcggggatctcatgctggagttcttcgcccaccctagggggaggctaactgaaacacggaaggagacaataccggaaggaacccgcgctatgacggcaataaaaagacagaataaaacgcacggtgttgggtcgtttgttcataaacgcggggttcggtcccagggctggcactctgtcgataccccaccgagaccccattggggccaatacgcccgcgtttcttccttttccccaccccaccccccaagttcgggtgaaggcccagggctcgcagccaacgtcggggcggcaggccctgccatagcctcaggttactcatatatactttagattgatttaaaacttcatttttaatttaaaaggatctaggtgaagatcctttttgataatctcatgaccaaaatcccttaacgtgagttttcgttccactgagcgtcagaccccgtagaaaagatcaaaggatcttcttgagatcctttttttctgcgcgtaatctgctgcttgcaaacaaaaaaaccaccgctaccagcggtggtttgtttgccggatcaagagctaccaactctttttccgaaggtaactggcttcagcagagcgcagataccaaatactgtccttctagtgtagccgtagttaggccaccacttcaagaactctgtagcaccgcctacatacctcgctctgctaatcctgttaccagtggctgctgccagtggcgataagtcgtgtcttaccgggttggactcaagacgatagttaccggataaggcgcagcggtcgggctgaacggggggttcgtgcacacagcccagcttggagcgaacgacctacaccgaactgagatacctacagcgtgagctatgagaaagcgccacgcttcccgaagggagaaaggcggacaggtatccggtaagcggcagggtcggaacaggagagcgcacgagggagcttccagggggaaacgcctggtatctttatagtcctgtcgggtttcgccacctctgacttgagcgtcgatttttgtgatgctcgtcaggggggcggagcctatggaaaaacgccagcaacgcggcctttttacggttcctggccttttgctggccttttgctcacatgttctttcctgcgttatcccctgattctgctagcttaagcggccgcgatctccaagtttccgccctcagttaattcggcgtttaattggcttttagttcacgtcaatatgcgtcctttcctgtctcttttcagtctaactccaatcataacgttcctggctgcccgcctgatttctgattggttttaatcagcttcatcctctcctattcctgcctacttcttacctctccgcccactaggattttgcccaagcatatcccggattctggttggccgttgttctgtcattcctatcaaagctttgcctatccctacgtctcagggagcccgcctgccggttgactggtttccttccaagccaatcatctccagctcccgcccatcttcacttcctgcatccttcattggcttttaacactgagagggcggtctttttaggcggacaccaggcacgcaacttagtctcacacgccttggagagcaagcgagtcttgccattggataattccaccgtctttcttctgcaagtccctcctttccccctccctcattgggcggggcagcagagaaggggcggggcctaggttgggcttgtggcgcgctgctccctcctccttacccccccctccctgtccggtccgggttcgcttgcctcgtcagcgtccgcgtttttcccggccccccccaacccccccggacaggacccccttgagcttgtccctcagctgccaccatgagcggtaaggatgagtccactccaagcttaggggtgggaggcgagtgagggggcgcgcgcgagggccgaccgggcgatccccgccgtgaagcgggggcgggcgggaggcggcggcggcggcggcctaggtcccgcccggggcggagggaagggagggagacggggcagtggcggggcctccgaggaggagggggatgggccgcccgccccgggggagggggcagcgtggcctcgcccgccccctgcccgccccggccacgggggacgggccttaccccccactactcggccgcccgcctgaggctcctcccgccgggggctggagccgcgggggcggcccgagcagcgaaggccccgcccgggccaaccgcctgcctggtccgccctctggtcgccgcctgctccaaggccctcctccccccactttccgtagatttcccttcccccccgccccccaccgtcccgccctttccacgcccctcaccccgaaaccgccctttccctcagggcccgccctccgcatctcgagagctcaagcttactagtgtggataaccgtattaccgccatgcat

SEQ ID NO: 43302 - DNA, 5229 bp, ARTIFICIAL SEQUENCE
  vector containing human replication origin
tagttattaatagtaatcaattacggggtcattagttcatagcccatatatggagttccgcgttacataacttacggtaaatggcccgcctggctgaccgcccaacgacccccgcccattgacgtcaataatgacgtatgttcccatagtaacgccaatagggactttccattgacgtcaatgggtggagtatttacggtaaactgcccacttggcagtacatcaagtgtatcatatgccaagtacgccccctattgacgtcaatgacggtaaatggcccgcctggcattatgcccagtacatgaccttatgggactttcctacttggcagtacatctacgtattagtcatcgctattaccatggtgatgcggttttggcagtacatcaatgggcgtggatagcggtttgactcacggggatttccaagtctccaccccattgacgtcaatgggagtttgttttggcaccaaaatcaacgggactttccaaaatgtcgtaacaactccgccccattgacgcaaatgggcggtaggcgtgtacggtgggaggtctatataagcagagctggtttagtgaaccgtcagatccgctagagcatgaccgagtacaagcccacggtgcgcctcgccacccgcgacgacgtcccccgggccgtacgcaccctcgccgccgcgttcgccgactaccccgccacgcgccacaccgtcgacccggaccgccacatcgagcgggtcaccgagctgcaagaactcttcctcacgcgcgtcgggctcgacatcggcaaggtgtgggtcgcggacgacggcgccgcggtggcggtctggaccacgccggagagcgtcgaagcgggggcggtgttcgccgagatcggcccgcgcatggccgagttgagcggttcccggctggccgcgcagcaacagatggaaggcctcctggcgccgcaccggcccaaggagcccgcgtggttcctggccaccgtcggcgtctcgcccgaccaccagggcaagggtctgggcagcgccgtcgtgctccccggagtggaggcggccgagcgcgccggggtgcccgccttcctggagacctccgcgccccgcaacctccccttctacgagcggctcggcttcaccgtcaccgccgacgtcgaggtgcccgaaggaccgcgcacctggtgcatgacccgcaagcccggtgcctagctgattggtctaaaatgagatacatcaacgctcctccatgttttttgttttctttttaaatgaaaaactttattttttaagaggagtttcaggttcatagcaaaattgagaggaaggtacattcaagctgaggaagttttcctctattcctagtttactgagagattgcatcatgaatgggtgttaaattttgtcaaatgctttttctgtgtctatcaatatgaccatgtgattttcttctttaacctgttgatgggacaaattacgttaattgattttcaaacgttgaaccacccttacatatctggaataaattctacttggttgtggtgtatattttttgatacattcttggattctttttgctaatattttgttgaaaatgtttgtatctttgttcatgagagatattggtctgttgttttcttttcttgtaatgtcattttctagttccggtattaaggtaatgctggcctagttgaatgatttaggaagtattccctctgcttctgtcttctgaaagagattgtagaaagttgatacaatttttttttctttaaatatttgatagaattctgcagtgaattctgcagtcgacggtaccgcgggcccgggatccaccggatctagataactgatcataatcagccataccacatttgtagaggttttacttgctttaaaaaacctcccacacctccccctgaacctgaaacataaaatgaatgcaattgttgttgttaacttgtttattgcagcttataatggttacaaataaagcaatagcatcacaaatttcacaaataaagcatttttttcactgcattctagttgtggtttgtccaaactcatcaatgtatcttaacgcgtaaattgtaagcgttaatattttgttaaaattcgcgttaaatttttgttaaatcagctcattttttaaccaataggccgaaatcggcgcggaacccctatttgtttatttttctaaatacattcaaatatgtatccgctcatgagacaataaccctgataaatgcttcaataatattgaaaaaggaagagtcaggatgaggatcgtttcgcatgattgaacaagatggattgcacgcaggttctccggccgcttgggtggagaggctattcggctatgactgggcacaacagacaatcggctgctctgatgccgccgtgttccggctgtcagcgcaggggcgcccggttctttttgtcaagaccgacctgtccggtgccctgaatgaactgcaagacgaggcagcgcggctatcgtggctggccacgacgggcgttccttgcgcagctgtgctcgacgttgtcactgaagcgggaagggactggctgctattgggcgaagtgccggggcaggatctcctgtcatctcaccttgctcctgccgagaaagtatccatcatggctgatgcaatgcggcggctgcatacgcttgatccggctacctgcccattcgaccaccaagcgaaacatcgcatcgagcgagcacgtactcggatggaagccggtcttgtcgatcaggatgatctggacgaagagcatcaggggctcgcgccagccgaactgttcgccaggctcaaggcgagcatgcccgacggcgaggatctcgtcgtgacccatggcgatgcctgcttgccgaatatcatggtggaaaatggccgcttttctggattcatcgactgtggccggctgggtgtggcggaccgctatcaggacatagcgttggctacccgtgatattgctgaagagcttggcggcgaatgggctgaccgcttcctcgtgctttacggtatcgccgctcccgattcgcagcgcatcgccttctatcgccttcttgacgagttcttctgagcgggactctggggttcgaaatgaccgaccaagcgacgcccaacctgccatcacgagatttcgattccaccgccgccttctatgaaaggttgggcttcggaatcgttttccgggacgccggctggatgatcctccagcgcggggatctcatgctggagttcttcgcccaccctagggggaggctaactgaaacacggaaggagacaataccggaaggaacccgcgctatgacggcaataaaaagacagaataaaacgcacggtgttgggtcgtttgttcataaacgcggggttcggtcccagggctggcactctgtcgataccccaccgagaccccattggggccaatacgcccgcgtttcttccttttccccaccccaccccccaagttcgggtgaaggcccagggctcgcagccaacgtcggggcggcaggccctgccatagcctcaggttactcatatatactttagattgatttaaaacttcatttttaatttaaaaggatctaggtgaagatcctttttgataatctcatgaccaaaatcccttaacgtgagttttcgttccactgagcgtcagaccccgtagaaaagatcaaaggatcttcttgagatcctttttttctgcgcgtaatctgctgcttgcaaacaaaaaaaccaccgctaccagcggtggtttgtttgccggatcaagagctaccaactctttttccgaaggtaactggcttcagcagagcgcagataccaaatactgtccttctagtgtagccgtagttaggccaccacttcaagaactctgtagcaccgcctacatacctcgctctgctaatcctgttaccagtggctgctgccagtggcgataagtcgtgtcttaccgggttggactcaagacgatagttaccggataaggcgcagcggtcgggctgaacggggggttcgtgcacacagcccagcttggagcgaacgacctacaccgaactgagatacctacagcgtgagctatgagaaagcgccacgcttcccgaagggagaaaggcggacaggtatccggtaagcggcagggtcggaacaggagagcgcacgagggagcttccagggggaaacgcctggtatctttatagtcctgtcgggtttcgccacctctgacttgagcgtcgatttttgtgatgctcgtcaggggggcggagcctatggaaaaacgccagcaacgcggcctttttacggttcctggccttttgctggccttttgctcacatgttctttcctgcgttatcccctgattctgctagcttaagcggccgcgattttctctctccttatgaccccaaacttccatcccattctctctgataatagcccccaaacccgtctggctccatctctgccacagatccctcaccccaagcttctctcacttctcaccaggcacccacaaagcccccaggcagctccatctttccaatccaatcccattatcccaatctctaccccaggatcccccaaactcctcccacttcacctctgccacagacccgctcgcccccaaacttcagcctcccctcatctgccctcaccacccacagcccctcctacctagccctctcccgcgccgggcccgcgggctccccacattccgccacggctagccctccccgcgccccggccccctcggcctcggcctcggccaactcgcgctgcgcctccccctctccggctccccctctctcccccctcgcggcttgcctcgcgctccctccctcgcgtctccctcctggcccctctctcctccgttcctccgcgctccctccttctccctcttcctcccttctcccatccccctctcccaggctccctcccttcgccgtccgctttcctgtgcgagtcgccggacgcaccgcccagcccgtccgcagccccgcgccgggtcggggcctcgggccgggccatttcggagggaccgcggcttcggggaggggctaggaggggggagagggagccgactgccggggaaggggcgggggccgcgggcgaggcggccgaggggcccgggatcgcgcgggtgcgggctgcgctaggcgggcgcgggcggcggcgggtcggaaccgatctcgagagctcaagcttactagtgtggataaccgtattaccgccatgcat

SEQ ID NO: 43303 - DNA, 5629 bp, ARTIFICIAL SEQUENCE
  vector containing human replication origin
tagttattaatagtaatcaattacggggtcattagttcatagcccatatatggagttccgcgttacataacttacggtaaatggcccgcctggctgaccgcccaacgacccccgcccattgacgtcaataatgacgtatgttcccatagtaacgccaatagggactttccattgacgtcaatgggtggagtatttacggtaaactgcccacttggcagtacatcaagtgtatcatatgccaagtacgccccctattgacgtcaatgacggtaaatggcccgcctggcattatgcccagtacatgaccttatgggactttcctacttggcagtacatctacgtattagtcatcgctattaccatggtgatgcggttttggcagtacatcaatgggcgtggatagcggtttgactcacggggatttccaagtctccaccccattgacgtcaatgggagtttgttttggcaccaaaatcaacgggactttccaaaatgtcgtaacaactccgccccattgacgcaaatgggcggtaggcgtgtacggtgggaggtctatataagcagagctggtttagtgaaccgtcagatccgctagagcatgaccgagtacaagcccacggtgcgcctcgccacccgcgacgacgtcccccgggccgtacgcaccctcgccgccgcgttcgccgactaccccgccacgcgccacaccgtcgacccggaccgccacatcgagcgggtcaccgagctgcaagaactcttcctcacgcgcgtcgggctcgacatcggcaaggtgtgggtcgcggacgacggcgccgcggtggcggtctggaccacgccggagagcgtcgaagcgggggcggtgttcgccgagatcggcccgcgcatggccgagttgagcggttcccggctggccgcgcagcaacagatggaaggcctcctggcgccgcaccggcccaaggagcccgcgtggttcctggccaccgtcggcgtctcgcccgaccaccagggcaagggtctgggcagcgccgtcgtgctccccggagtggaggcggccgagcgcgccggggtgcccgccttcctggagacctccgcgccccgcaacctccccttctacgagcggctcggcttcaccgtcaccgccgacgtcgaggtgcccgaaggaccgcgcacctggtgcatgacccgcaagcccggtgcctagctgattggtctaaaatgagatacatcaacgctcctccatgttttttgttttctttttaaatgaaaaactttattttttaagaggagtttcaggttcatagcaaaattgagaggaaggtacattcaagctgaggaagttttcctctattcctagtttactgagagattgcatcatgaatgggtgttaaattttgtcaaatgctttttctgtgtctatcaatatgaccatgtgattttcttctttaacctgttgatgggacaaattacgttaattgattttcaaacgttgaaccacccttacatatctggaataaattctacttggttgtggtgtatattttttgatacattcttggattctttttgctaatattttgttgaaaatgtttgtatctttgttcatgagagatattggtctgttgttttcttttcttgtaatgtcattttctagttccggtattaaggtaatgctggcctagttgaatgatttaggaagtattccctctgcttctgtcttctgaaagagattgtagaaagttgatacaatttttttttctttaaatatttgatagaattctgcagtgaattctgcagtcgacggtaccgcgggcccgggatccaccggatctagataactgatcataatcagccataccacatttgtagaggttttacttgctttaaaaaacctcccacacctccccctgaacctgaaacataaaatgaatgcaattgttgttgttaacttgtttattgcagcttataatggttacaaataaagcaatagcatcacaaatttcacaaataaagcatttttttcactgcattctagttgtggtttgtccaaactcatcaatgtatcttaacgcgtaaattgtaagcgttaatattttgttaaaattcgcgttaaatttttgttaaatcagctcattttttaaccaataggccgaaatcggcgcggaacccctatttgtttatttttctaaatacattcaaatatgtatccgctcatgagacaataaccctgataaatgcttcaataatattgaaaaaggaagagtcaggatgaggatcgtttcgcatgattgaacaagatggattgcacgcaggttctccggccgcttgggtggagaggctattcggctatgactgggcacaacagacaatcggctgctctgatgccgccgtgttccggctgtcagcgcaggggcgcccggttctttttgtcaagaccgacctgtccggtgccctgaatgaactgcaagacgaggcagcgcggctatcgtggctggccacgacgggcgttccttgcgcagctgtgctcgacgttgtcactgaagcgggaagggactggctgctattgggcgaagtgccggggcaggatctcctgtcatctcaccttgctcctgccgagaaagtatccatcatggctgatgcaatgcggcggctgcatacgcttgatccggctacctgcccattcgaccaccaagcgaaacatcgcatcgagcgagcacgtactcggatggaagccggtcttgtcgatcaggatgatctggacgaagagcatcaggggctcgcgccagccgaactgttcgccaggctcaaggcgagcatgcccgacggcgaggatctcgtcgtgacccatggcgatgcctgcttgccgaatatcatggtggaaaatggccgcttttctggattcatcgactgtggccggctgggtgtggcggaccgctatcaggacatagcgttggctacccgtgatattgctgaagagcttggcggcgaatgggctgaccgcttcctcgtgctttacggtatcgccgctcccgattcgcagcgcatcgccttctatcgccttcttgacgagttcttctgagcgggactctggggttcgaaatgaccgaccaagcgacgcccaacctgccatcacgagatttcgattccaccgccgccttctatgaaaggttgggcttcggaatcgttttccgggacgccggctggatgatcctccagcgcggggatctcatgctggagttcttcgcccaccctagggggaggctaactgaaacacggaaggagacaataccggaaggaacccgcgctatgacggcaataaaaagacagaataaaacgcacggtgttgggtcgtttgttcataaacgcggggttcggtcccagggctggcactctgtcgataccccaccgagaccccattggggccaatacgcccgcgtttcttccttttccccaccccaccccccaagttcgggtgaaggcccagggctcgcagccaacgtcggggcggcaggccctgccatagcctcaggttactcatatatactttagattgatttaaaacttcatttttaatttaaaaggatctaggtgaagatcctttttgataatctcatgaccaaaatcccttaacgtgagttttcgttccactgagcgtcagaccccgtagaaaagatcaaaggatcttcttgagatcctttttttctgcgcgtaatctgctgcttgcaaacaaaaaaaccaccgctaccagcggtggtttgtttgccggatcaagagctaccaactctttttccgaaggtaactggcttcagcagagcgcagataccaaatactgtccttctagtgtagccgtagttaggccaccacttcaagaactctgtagcaccgcctacatacctcgctctgctaatcctgttaccagtggctgctgccagtggcgataagtcgtgtcttaccgggttggactcaagacgatagttaccggataaggcgcagcggtcgggctgaacggggggttcgtgcacacagcccagcttggagcgaacgacctacaccgaactgagatacctacagcgtgagctatgagaaagcgccacgcttcccgaagggagaaaggcggacaggtatccggtaagcggcagggtcggaacaggagagcgcacgagggagcttccagggggaaacgcctggtatctttatagtcctgtcgggtttcgccacctctgacttgagcgtcgatttttgtgatgctcgtcaggggggcggagcctatggaaaaacgccagcaacgcggcctttttacggttcctggccttttgctggccttttgctcacatgttctttcctgcgttatcccctgattctgctagcttaagcggccgcgattgcccatcatttaggcagaatgccacggaggcgacgtgaaaagtggaattcatcattctggcttgcaacgcatcttgttcttttgccagaacagggcacagcaactggctcctcaatctctgcccctcccaaaccccagcagccggtccctgtctccatcccgccggcctcggtggcaaggggctcgcgagctctggttggcttggccgaagcttccgtcactcgccagctcacctacgattggttggcagagcgtgcgcgaagagccccgcctggcaaggcactgggaggtgggcttgcggatcctacgactagcgtttttctcgattggttgaaggagtaaaggcacgtggtatgggggcgctctcttattggtcgtgaatggtaccttgtggtacagagacgtgatgtggttggctagaatgaatcccagcttcccactagatgcccctagctggctgttgctatgaggagtccagggccttccggctgccgttcgggattccgctctccaggttttcaactcacccgtggctgacagggcgtgggaagagctcgacttcagttcggcaccgaaaggggcgggtctagaagaaatgtgggcgggtccagagggttggtgggcgggaccccggcgacgtcagcgggcttggacccgacttccgtggtgtgtggccgcctctgactcgcccctctggcgcgctgctagaggggggcgtcaccctcccatcaatgtcctaacgctccaaagcttcattttgttgcgtttacacaacttcagtcagaagcctgtaggtgccccccccttaaagcttcacatgctaatacaagataaaaccaaagctctaggagtgctgacagactgggtggcatcggacaaaggccctcgcggcccctcttgggccttgggcatctctccttcactccccgcctcaggataaagcttggaggtagctctagcccctctaccatctcatcccttccgaattcttaatgtctcgggagtctcaggttgacgctgctcctggcttgggcgggaactgcgcatgctcggtacacaggccctggggtctgactgggcgcgctgggttcggcgctgctcggcggtcgcggtgcttgtttatctccgcgcgggcagaagcttccgagccccgcaaagcctctcgggagcgctcgcggcccgtcgcctagggggcggggatctcgagagctcaagcttactagtgtggataaccgtattaccgccatgcat

SEQ ID NO: 43304 - DNA, 5694 bp, ARTIFICIAL SEQUENCE
  vector containing human replication origin
tagttattaatagtaatcaattacggggtcattagttcatagcccatatatggagttccgcgttacataacttacggtaaatggcccgcctggctgaccgcccaacgacccccgcccattgacgtcaataatgacgtatgttcccatagtaacgccaatagggactttccattgacgtcaatgggtggagtatttacggtaaactgcccacttggcagtacatcaagtgtatcatatgccaagtacgccccctattgacgtcaatgacggtaaatggcccgcctggcattatgcccagtacatgaccttatgggactttcctacttggcagtacatctacgtattagtcatcgctattaccatggtgatgcggttttggcagtacatcaatgggcgtggatagcggtttgactcacggggatttccaagtctccaccccattgacgtcaatgggagtttgttttggcaccaaaatcaacgggactttccaaaatgtcgtaacaactccgccccattgacgcaaatgggcggtaggcgtgtacggtgggaggtctatataagcagagctggtttagtgaaccgtcagatccgctagagcatgaccgagtacaagcccacggtgcgcctcgccacccgcgacgacgtcccccgggccgtacgcaccctcgccgccgcgttcgccgactaccccgccacgcgccacaccgtcgacccggaccgccacatcgagcgggtcaccgagctgcaagaactcttcctcacgcgcgtcgggctcgacatcggcaaggtgtgggtcgcggacgacggcgccgcggtggcggtctggaccacgccggagagcgtcgaagcgggggcggtgttcgccgagatcggcccgcgcatggccgagttgagcggttcccggctggccgcgcagcaacagatggaaggcctcctggcgccgcaccggcccaaggagcccgcgtggttcctggccaccgtcggcgtctcgcccgaccaccagggcaagggtctgggcagcgccgtcgtgctccccggagtggaggcggccgagcgcgccggggtgcccgccttcctggagacctccgcgccccgcaacctccccttctacgagcggctcggcttcaccgtcaccgccgacgtcgaggtgcccgaaggaccgcgcacctggtgcatgacccgcaagcccggtgcctagctgattggtctaaaatgagatacatcaacgctcctccatgttttttgttttctttttaaatgaaaaactttattttttaagaggagtttcaggttcatagcaaaattgagaggaaggtacattcaagctgaggaagttttcctctattcctagtttactgagagattgcatcatgaatgggtgttaaattttgtcaaatgctttttctgtgtctatcaatatgaccatgtgattttcttctttaacctgttgatgggacaaattacgttaattgattttcaaacgttgaaccacccttacatatctggaataaattctacttggttgtggtgtatattttttgatacattcttggattctttttgctaatattttgttgaaaatgtttgtatctttgttcatgagagatattggtctgttgttttcttttcttgtaatgtcattttctagttccggtattaaggtaatgctggcctagttgaatgatttaggaagtattccctctgcttctgtcttctgaaagagattgtagaaagttgatacaatttttttttctttaaatatttgatagaattctgcagtgaattctgcagtcgacggtaccgcgggcccgggatccaccggatctagataactgatcataatcagccataccacatttgtagaggttttacttgctttaaaaaacctcccacacctccccctgaacctgaaacataaaatgaatgcaattgttgttgttaacttgtttattgcagcttataatggttacaaataaagcaatagcatcacaaatttcacaaataaagcatttttttcactgcattctagttgtggtttgtccaaactcatcaatgtatcttaacgcgtaaattgtaagcgttaatattttgttaaaattcgcgttaaatttttgttaaatcagctcattttttaaccaataggccgaaatcggcgcggaacccctatttgtttatttttctaaatacattcaaatatgtatccgctcatgagacaataaccctgataaatgcttcaataatattgaaaaaggaagagtcaggatgaggatcgtttcgcatgattgaacaagatggattgcacgcaggttctccggccgcttgggtggagaggctattcggctatgactgggcacaacagacaatcggctgctctgatgccgccgtgttccggctgtcagcgcaggggcgcccggttctttttgtcaagaccgacctgtccggtgccctgaatgaactgcaagacgaggcagcgcggctatcgtggctggccacgacgggcgttccttgcgcagctgtgctcgacgttgtcactgaagcgggaagggactggctgctattgggcgaagtgccggggcaggatctcctgtcatctcaccttgctcctgccgagaaagtatccatcatggctgatgcaatgcggcggctgcatacgcttgatccggctacctgcccattcgaccaccaagcgaaacatcgcatcgagcgagcacgtactcggatggaagccggtcttgtcgatcaggatgatctggacgaagagcatcaggggctcgcgccagccgaactgttcgccaggctcaaggcgagcatgcccgacggcgaggatctcgtcgtgacccatggcgatgcctgcttgccgaatatcatggtggaaaatggccgcttttctggattcatcgactgtggccggctgggtgtggcggaccgctatcaggacatagcgttggctacccgtgatattgctgaagagcttggcggcgaatgggctgaccgcttcctcgtgctttacggtatcgccgctcccgattcgcagcgcatcgccttctatcgccttcttgacgagttcttctgagcgggactctggggttcgaaatgaccgaccaagcgacgcccaacctgccatcacgagatttcgattccaccgccgccttctatgaaaggttgggcttcggaatcgttttccgggacgccggctggatgatcctccagcgcggggatctcatgctggagttcttcgcccaccctagggggaggctaactgaaacacggaaggagacaataccggaaggaacccgcgctatgacggcaataaaaagacagaataaaacgcacggtgttgggtcgtttgttcataaacgcggggttcggtcccagggctggcactctgtcgataccccaccgagaccccattggggccaatacgcccgcgtttcttccttttccccaccccaccccccaagttcgggtgaaggcccagggctcgcagccaacgtcggggcggcaggccctgccatagcctcaggttactcatatatactttagattgatttaaaacttcatttttaatttaaaaggatctaggtgaagatcctttttgataatctcatgaccaaaatcccttaacgtgagttttcgttccactgagcgtcagaccccgtagaaaagatcaaaggatcttcttgagatcctttttttctgcgcgtaatctgctgcttgcaaacaaaaaaaccaccgctaccagcggtggtttgtttgccggatcaagagctaccaactctttttccgaaggtaactggcttcagcagagcgcagataccaaatactgtccttctagtgtagccgtagttaggccaccacttcaagaactctgtagcaccgcctacatacctcgctctgctaatcctgttaccagtggctgctgccagtggcgataagtcgtgtcttaccgggttggactcaagacgatagttaccggataaggcgcagcggtcgggctgaacggggggttcgtgcacacagcccagcttggagcgaacgacctacaccgaactgagatacctacagcgtgagctatgagaaagcgccacgcttcccgaagggagaaaggcggacaggtatccggtaagcggcagggtcggaacaggagagcgcacgagggagcttccagggggaaacgcctggtatctttatagtcctgtcgggtttcgccacctctgacttgagcgtcgatttttgtgatgctcgtcaggggggcggagcctatggaaaaacgccagcaacgcggcctttttacggttcctggccttttgctggccttttgctcacatgttctttcctgcgttatcccctgattctgctagcttaagcggccgcgataagagacggggtctcgctatgttgctcaggctggagtgcagtggctattcacaggcgcgatcccactactgatcagcacgggagttttgacctgctccgtttccgacctgggccggttcacccctccttaggcaacctggtggtcccccgctcccgggaggtcaccatattgatgccgaacttagtgcggacacccgatcggcatagcgcactacagcccagaactcctgggctcaagcgatcctcccacctcagcctcccgagtagctgggactacaggcacgcgccaccgcgcccggcggtcggagacgctgcgaaaagctactagaagctgcagggcagttacgtcattggggagcgggggggccacgccgggcgacgtgagcttggacacacccacactgggcggtctggaggctacgttagtgtggcgtcatccgagctgggcagccgttctgccttacagggttgggaccccggaagcttatcggcgcggttgcggccgcggctccctgtgttttgatcagaacaccacgttcctgcttaacagaaattggtcagtatgcgcttaatgctcatagtgtggcgtccggacacgcagcgagagaaaaacgcaataacctggtccgtcagcgttgcttgcttcagcaggccttaaatatgtgctgcatcttttgggggacgttacttaagaggcaaacatctggctcgaagtcttccattattttcagcaagcatttaggaggtgactgcactataaggagaataacccacagtagcacaggttgggagtctgcacagtgccgaggccagctcagtcttcactattcgaacgaaggaagcctggggcaactgtttgttttctctgccctgcgtgttagttgcccgttgtttttggagaaaaaactagtatcggggtatattggtggaaaaatttggatttggcagcttgaagccttttttgcgacaagcttaggttaggaagggatagaggggaggaaagaaaaaataattttcgaccatagtagatctgcgaaagcagaccttctgtttgtcctcttatctatagtctttccctcaccccccaccccttgtctcctaaaaaccagtccagactttccccgccacctccgtccttgtagcagataacgttgctccttccttcatggataaattgaaggccaacagacaaaaacttttcaactctttgctgctctgtccgctctaaatttatctttacaccttcagagaagagcacccttctgatctcgagagctcaagcttactagtgtggataaccgtattaccgccatgcat

SEQ ID NO: 43305 - DNA, 5619 bp, ARTIFICIAL SEQUENCE
  vector containing human replication origin
tagttattaatagtaatcaattacggggtcattagttcatagcccatatatggagttccgcgttacataacttacggtaaatggcccgcctggctgaccgcccaacgacccccgcccattgacgtcaataatgacgtatgttcccatagtaacgccaatagggactttccattgacgtcaatgggtggagtatttacggtaaactgcccacttggcagtacatcaagtgtatcatatgccaagtacgccccctattgacgtcaatgacggtaaatggcccgcctggcattatgcccagtacatgaccttatgggactttcctacttggcagtacatctacgtattagtcatcgctattaccatggtgatgcggttttggcagtacatcaatgggcgtggatagcggtttgactcacggggatttccaagtctccaccccattgacgtcaatgggagtttgttttggcaccaaaatcaacgggactttccaaaatgtcgtaacaactccgccccattgacgcaaatgggcggtaggcgtgtacggtgggaggtctatataagcagagctggtttagtgaaccgtcagatccgctagagcatgaccgagtacaagcccacggtgcgcctcgccacccgcgacgacgtcccccgggccgtacgcaccctcgccgccgcgttcgccgactaccccgccacgcgccacaccgtcgacccggaccgccacatcgagcgggtcaccgagctgcaagaactcttcctcacgcgcgtcgggctcgacatcggcaaggtgtgggtcgcggacgacggcgccgcggtggcggtctggaccacgccggagagcgtcgaagcgggggcggtgttcgccgagatcggcccgcgcatggccgagttgagcggttcccggctggccgcgcagcaacagatggaaggcctcctggcgccgcaccggcccaaggagcccgcgtggttcctggccaccgtcggcgtctcgcccgaccaccagggcaagggtctgggcagcgccgtcgtgctccccggagtggaggcggccgagcgcgccggggtgcccgccttcctggagacctccgcgccccgcaacctccccttctacgagcggctcggcttcaccgtcaccgccgacgtcgaggtgcccgaaggaccgcgcacctggtgcatgacccgcaagcccggtgcctagctgattggtctaaaatgagatacatcaacgctcctccatgttttttgttttctttttaaatgaaaaactttattttttaagaggagtttcaggttcatagcaaaattgagaggaaggtacattcaagctgaggaagttttcctctattcctagtttactgagagattgcatcatgaatgggtgttaaattttgtcaaatgctttttctgtgtctatcaatatgaccatgtgattttcttctttaacctgttgatgggacaaattacgttaattgattttcaaacgttgaaccacccttacatatctggaataaattctacttggttgtggtgtatattttttgatacattcttggattctttttgctaatattttgttgaaaatgtttgtatctttgttcatgagagatattggtctgttgttttcttttcttgtaatgtcattttctagttccggtattaaggtaatgctggcctagttgaatgatttaggaagtattccctctgcttctgtcttctgaaagagattgtagaaagttgatacaatttttttttctttaaatatttgatagaattctgcagtgaattctgcagtcgacggtaccgcgggcccgggatccaccggatctagataactgatcataatcagccataccacatttgtagaggttttacttgctttaaaaaacctcccacacctccccctgaacctgaaacataaaatgaatgcaattgttgttgttaacttgtttattgcagcttataatggttacaaataaagcaatagcatcacaaatttcacaaataaagcatttttttcactgcattctagttgtggtttgtccaaactcatcaatgtatcttaacgcgtaaattgtaagcgttaatattttgttaaaattcgcgttaaatttttgttaaatcagctcattttttaaccaataggccgaaatcggcgcggaacccctatttgtttatttttctaaatacattcaaatatgtatccgctcatgagacaataaccctgataaatgcttcaataatattgaaaaaggaagagtcaggatgaggatcgtttcgcatgattgaacaagatggattgcacgcaggttctccggccgcttgggtggagaggctattcggctatgactgggcacaacagacaatcggctgctctgatgccgccgtgttccggctgtcagcgcaggggcgcccggttctttttgtcaagaccgacctgtccggtgccctgaatgaactgcaagacgaggcagcgcggctatcgtggctggccacgacgggcgttccttgcgcagctgtgctcgacgttgtcactgaagcgggaagggactggctgctattgggcgaagtgccggggcaggatctcctgtcatctcaccttgctcctgccgagaaagtatccatcatggctgatgcaatgcggcggctgcatacgcttgatccggctacctgcccattcgaccaccaagcgaaacatcgcatcgagcgagcacgtactcggatggaagccggtcttgtcgatcaggatgatctggacgaagagcatcaggggctcgcgccagccgaactgttcgccaggctcaaggcgagcatgcccgacggcgaggatctcgtcgtgacccatggcgatgcctgcttgccgaatatcatggtggaaaatggccgcttttctggattcatcgactgtggccggctgggtgtggcggaccgctatcaggacatagcgttggctacccgtgatattgctgaagagcttggcggcgaatgggctgaccgcttcctcgtgctttacggtatcgccgctcccgattcgcagcgcatcgccttctatcgccttcttgacgagttcttctgagcgggactctggggttcgaaatgaccgaccaagcgacgcccaacctgccatcacgagatttcgattccaccgccgccttctatgaaaggttgggcttcggaatcgttttccgggacgccggctggatgatcctccagcgcggggatctcatgctggagttcttcgcccaccctagggggaggctaactgaaacacggaaggagacaataccggaaggaacccgcgctatgacggcaataaaaagacagaataaaacgcacggtgttgggtcgtttgttcataaacgcggggttcggtcccagggctggcactctgtcgataccccaccgagaccccattggggccaatacgcccgcgtttcttccttttccccaccccaccccccaagttcgggtgaaggcccagggctcgcagccaacgtcggggcggcaggccctgccatagcctcaggttactcatatatactttagattgatttaaaacttcatttttaatttaaaaggatctaggtgaagatcctttttgataatctcatgaccaaaatcccttaacgtgagttttcgttccactgagcgtcagaccccgtagaaaagatcaaaggatcttcttgagatcctttttttctgcgcgtaatctgctgcttgcaaacaaaaaaaccaccgctaccagcggtggtttgtttgccggatcaagagctaccaactctttttccgaaggtaactggcttcagcagagcgcagataccaaatactgtccttctagtgtagccgtagttaggccaccacttcaagaactctgtagcaccgcctacatacctcgctctgctaatcctgttaccagtggctgctgccagtggcgataagtcgtgtcttaccgggttggactcaagacgatagttaccggataaggcgcagcggtcgggctgaacggggggttcgtgcacacagcccagcttggagcgaacgacctacaccgaactgagatacctacagcgtgagctatgagaaagcgccacgcttcccgaagggagaaaggcggacaggtatccggtaagcggcagggtcggaacaggagagcgcacgagggagcttccagggggaaacgcctggtatctttatagtcctgtcgggtttcgccacctctgacttgagcgtcgatttttgtgatgctcgtcaggggggcggagcctatggaaaaacgccagcaacgcggcctttttacggttcctggccttttgctggccttttgctcacatgttctttcctgcgttatcccctgattctgctagcttaagcggccgcgataagaaaggggcttttgtcactttgacaattatattcctaattccccctagccttgacccgcattccaaggccccgacaaggtgtaaagccctgcctttctgatagtcactcctcccctacagtaatcaatctatcaaccttattttcagataaacaaggaaggcgaagggagtgactaggggatcttatttactacaatctaacctcagacatgcccagccagctcccaaaacagaaacaaaaatcaaacttgtcacaattgagaaaaatataaaatcaaccttcaaaagtacacctcacgcccggccatgtcaaccaaacattttgcccactcgggcccccacctcgacacctctccccagccgggggttcctcacccttccttccacccggacaccaccgccacaacccgaggggcaggagcggagcctaagaacaaagaaggtcccccaaaatcccccccacgccggcaaaacccggagccgaatccattgtttataccaccccacccccacccccgccgcacccgcccccccttcctcccgagggcagcctgagccccaggacgatcactcgccccgcgctgggccgtgccctccccgccctgccctgcccgccgcggcccggggatcccaccactgagaagctcggccgcagcaaggcggcgtcggggggccgcagggcgccagtgggggcagaggctattcctcaggacaccggcagatccatcctcatctccatctccgccaccctcctccttcgttgcctcccgggcttcctcctctcctgttgtcagttgggatcagctgatcggagtgaacttctcccagctcggactaacaggaaggcgtgagcggtgcagcccagaaagggaggagcgagagagggaggatcccggcgccagcaagggcgtagtgcgcactgcctcctgggagatgtagctcctcgaggcgcgctctcgcccctcatcccggaaaggaagactctgaatgactacaactcccagtactgaagaggctgctcttgcgaggaggcggtggggacaggctacggaggatttcgggacttggagtttttgcattgagtgtggtgtccgcaggtttcagcacgttcttttgggttgtaactggggaaggcatggtgctacattagagaactgatgtaataatgtctagtataagtgggaaatgatctcgagagctcaagcttactagtgtggataaccgtattaccgccatgcat

SEQ ID NO: 43306 - DNA, 5429 bp, ARTIFICIAL SEQUENCE
  vector containing human replication origin
tagttattaatagtaatcaattacggggtcattagttcatagcccatatatggagttccgcgttacataacttacggtaaatggcccgcctggctgaccgcccaacgacccccgcccattgacgtcaataatgacgtatgttcccatagtaacgccaatagggactttccattgacgtcaatgggtggagtatttacggtaaactgcccacttggcagtacatcaagtgtatcatatgccaagtacgccccctattgacgtcaatgacggtaaatggcccgcctggcattatgcccagtacatgaccttatgggactttcctacttggcagtacatctacgtattagtcatcgctattaccatggtgatgcggttttggcagtacatcaatgggcgtggatagcggtttgactcacggggatttccaagtctccaccccattgacgtcaatgggagtttgttttggcaccaaaatcaacgggactttccaaaatgtcgtaacaactccgccccattgacgcaaatgggcggtaggcgtgtacggtgggaggtctatataagcagagctggtttagtgaaccgtcagatccgctagagcatgaccgagtacaagcccacggtgcgcctcgccacccgcgacgacgtcccccgggccgtacgcaccctcgccgccgcgttcgccgactaccccgccacgcgccacaccgtcgacccggaccgccacatcgagcgggtcaccgagctgcaagaactcttcctcacgcgcgtcgggctcgacatcggcaaggtgtgggtcgcggacgacggcgccgcggtggcggtctggaccacgccggagagcgtcgaagcgggggcggtgttcgccgagatcggcccgcgcatggccgagttgagcggttcccggctggccgcgcagcaacagatggaaggcctcctggcgccgcaccggcccaaggagcccgcgtggttcctggccaccgtcggcgtctcgcccgaccaccagggcaagggtctgggcagcgccgtcgtgctccccggagtggaggcggccgagcgcgccggggtgcccgccttcctggagacctccgcgccccgcaacctccccttctacgagcggctcggcttcaccgtcaccgccgacgtcgaggtgcccgaaggaccgcgcacctggtgcatgacccgcaagcccggtgcctagctgattggtctaaaatgagatacatcaacgctcctccatgttttttgttttctttttaaatgaaaaactttattttttaagaggagtttcaggttcatagcaaaattgagaggaaggtacattcaagctgaggaagttttcctctattcctagtttactgagagattgcatcatgaatgggtgttaaattttgtcaaatgctttttctgtgtctatcaatatgaccatgtgattttcttctttaacctgttgatgggacaaattacgttaattgattttcaaacgttgaaccacccttacatatctggaataaattctacttggttgtggtgtatattttttgatacattcttggattctttttgctaatattttgttgaaaatgtttgtatctttgttcatgagagatattggtctgttgttttcttttcttgtaatgtcattttctagttccggtattaaggtaatgctggcctagttgaatgatttaggaagtattccctctgcttctgtcttctgaaagagattgtagaaagttgatacaatttttttttctttaaatatttgatagaattctgcagtgaattctgcagtcgacggtaccgcgggcccgggatccaccggatctagataactgatcataatcagccataccacatttgtagaggttttacttgctttaaaaaacctcccacacctccccctgaacctgaaacataaaatgaatgcaattgttgttgttaacttgtttattgcagcttataatggttacaaataaagcaatagcatcacaaatttcacaaataaagcatttttttcactgcattctagttgtggtttgtccaaactcatcaatgtatcttaacgcgtaaattgtaagcgttaatattttgttaaaattcgcgttaaatttttgttaaatcagctcattttttaaccaataggccgaaatcggcgcggaacccctatttgtttatttttctaaatacattcaaatatgtatccgctcatgagacaataaccctgataaatgcttcaataatattgaaaaaggaagagtcaggatgaggatcgtttcgcatgattgaacaagatggattgcacgcaggttctccggccgcttgggtggagaggctattcggctatgactgggcacaacagacaatcggctgctctgatgccgccgtgttccggctgtcagcgcaggggcgcccggttctttttgtcaagaccgacctgtccggtgccctgaatgaactgcaagacgaggcagcgcggctatcgtggctggccacgacgggcgttccttgcgcagctgtgctcgacgttgtcactgaagcgggaagggactggctgctattgggcgaagtgccggggcaggatctcctgtcatctcaccttgctcctgccgagaaagtatccatcatggctgatgcaatgcggcggctgcatacgcttgatccggctacctgcccattcgaccaccaagcgaaacatcgcatcgagcgagcacgtactcggatggaagccggtcttgtcgatcaggatgatctggacgaagagcatcaggggctcgcgccagccgaactgttcgccaggctcaaggcgagcatgcccgacggcgaggatctcgtcgtgacccatggcgatgcctgcttgccgaatatcatggtggaaaatggccgcttttctggattcatcgactgtggccggctgggtgtggcggaccgctatcaggacatagcgttggctacccgtgatattgctgaagagcttggcggcgaatgggctgaccgcttcctcgtgctttacggtatcgccgctcccgattcgcagcgcatcgccttctatcgccttcttgacgagttcttctgagcgggactctggggttcgaaatgaccgaccaagcgacgcccaacctgccatcacgagatttcgattccaccgccgccttctatgaaaggttgggcttcggaatcgttttccgggacgccggctggatgatcctccagcgcggggatctcatgctggagttcttcgcccaccctagggggaggctaactgaaacacggaaggagacaataccggaaggaacccgcgctatgacggcaataaaaagacagaataaaacgcacggtgttgggtcgtttgttcataaacgcggggttcggtcccagggctggcactctgtcgataccccaccgagaccccattggggccaatacgcccgcgtttcttccttttccccaccccaccccccaagttcgggtgaaggcccagggctcgcagccaacgtcggggcggcaggccctgccatagcctcaggttactcatatatactttagattgatttaaaacttcatttttaatttaaaaggatctaggtgaagatcctttttgataatctcatgaccaaaatcccttaacgtgagttttcgttccactgagcgtcagaccccgtagaaaagatcaaaggatcttcttgagatcctttttttctgcgcgtaatctgctgcttgcaaacaaaaaaaccaccgctaccagcggtggtttgtttgccggatcaagagctaccaactctttttccgaaggtaactggcttcagcagagcgcagataccaaatactgtccttctagtgtagccgtagttaggccaccacttcaagaactctgtagcaccgcctacatacctcgctctgctaatcctgttaccagtggctgctgccagtggcgataagtcgtgtcttaccgggttggactcaagacgatagttaccggataaggcgcagcggtcgggctgaacggggggttcgtgcacacagcccagcttggagcgaacgacctacaccgaactgagatacctacagcgtgagctatgagaaagcgccacgcttcccgaagggagaaaggcggacaggtatccggtaagcggcagggtcggaacaggagagcgcacgagggagcttccagggggaaacgcctggtatctttatagtcctgtcgggtttcgccacctctgacttgagcgtcgatttttgtgatgctcgtcaggggggcggagcctatggaaaaacgccagcaacgcggcctttttacggttcctggccttttgctggccttttgctcacatgttctttcctgcgttatcccctgattctgctagcttaagcggccgcgatggatggtcgaccctcagatacgggagggattgagcgatgcccaaggagagcaggagaacactgcgcttggagacccctgagagccaggggcgggccgccccctaaagggaccccggagtcccgactctcagctccagctcttcctgtgacaccaccctccggacagagacccaagctccaggcccggccccgcccagaggttccagggagaagaccaggccaccgcccactgcccggcgtcggggaggaaagaggaggagcctctgtgtgcccacatctctggccgcccagggcagctcggctcggtctcgcaaccccagcccactggttcgggagacctcaaaggctccaccgccagcgcccccagcgctcactgtgtgcgccccaccccagccctgcctgcgcgccgctcccgccaccctcgcctcagtctctgggccggaagccccctctcctcccccgccgcagccccctcctagtccctctccctccgccgatgcgggaaaccttctccgccccgtcccgccctcttcctccagttgcatctccgcccggctcctccgtccagtctccaacccaggccccgcccctccccacccatttcccgccctgggccgggcccccggccccaccgccccctccccggccccgccccggcccccggaagcctcaccccgcccccggccccgcccccccgaagtttcttgggcccccggcagccggcgggacagaacgcggagagtcgccgcctggccgggcgtagacgcggtggcagagcccgcgcggcgctggaagcgagtggcggagcggcgggacctcggcggactcgccatggaggaggaggtgagggcggggcccggcggggcgttgggctggggtcctcgagcccctcacggggattgcggtcctgggctcaggccctcgttcctgcccgccccactcccgccagtctcacctcaggaagagcctgggcaaatggggcaggggcgaggggctggatatctcgagagctcaagcttactagtgtggataaccgtattaccgccatgcat

SEQ ID NO: 43307 - DNA, 5549 bp, ARTIFICIAL SEQUENCE
  vector containing human replication origin
tagttattaatagtaatcaattacggggtcattagttcatagcccatatatggagttccgcgttacataacttacggtaaatggcccgcctggctgaccgcccaacgacccccgcccattgacgtcaataatgacgtatgttcccatagtaacgccaatagggactttccattgacgtcaatgggtggagtatttacggtaaactgcccacttggcagtacatcaagtgtatcatatgccaagtacgccccctattgacgtcaatgacggtaaatggcccgcctggcattatgcccagtacatgaccttatgggactttcctacttggcagtacatctacgtattagtcatcgctattaccatggtgatgcggttttggcagtacatcaatgggcgtggatagcggtttgactcacggggatttccaagtctccaccccattgacgtcaatgggagtttgttttggcaccaaaatcaacgggactttccaaaatgtcgtaacaactccgccccattgacgcaaatgggcggtaggcgtgtacggtgggaggtctatataagcagagctggtttagtgaaccgtcagatccgctagagcatgaccgagtacaagcccacggtgcgcctcgccacccgcgacgacgtcccccgggccgtacgcaccctcgccgccgcgttcgccgactaccccgccacgcgccacaccgtcgacccggaccgccacatcgagcgggtcaccgagctgcaagaactcttcctcacgcgcgtcgggctcgacatcggcaaggtgtgggtcgcggacgacggcgccgcggtggcggtctggaccacgccggagagcgtcgaagcgggggcggtgttcgccgagatcggcccgcgcatggccgagttgagcggttcccggctggccgcgcagcaacagatggaaggcctcctggcgccgcaccggcccaaggagcccgcgtggttcctggccaccgtcggcgtctcgcccgaccaccagggcaagggtctgggcagcgccgtcgtgctccccggagtggaggcggccgagcgcgccggggtgcccgccttcctggagacctccgcgccccgcaacctccccttctacgagcggctcggcttcaccgtcaccgccgacgtcgaggtgcccgaaggaccgcgcacctggtgcatgacccgcaagcccggtgcctagctgattggtctaaaatgagatacatcaacgctcctccatgttttttgttttctttttaaatgaaaaactttattttttaagaggagtttcaggttcatagcaaaattgagaggaaggtacattcaagctgaggaagttttcctctattcctagtttactgagagattgcatcatgaatgggtgttaaattttgtcaaatgctttttctgtgtctatcaatatgaccatgtgattttcttctttaacctgttgatgggacaaattacgttaattgattttcaaacgttgaaccacccttacatatctggaataaattctacttggttgtggtgtatattttttgatacattcttggattctttttgctaatattttgttgaaaatgtttgtatctttgttcatgagagatattggtctgttgttttcttttcttgtaatgtcattttctagttccggtattaaggtaatgctggcctagttgaatgatttaggaagtattccctctgcttctgtcttctgaaagagattgtagaaagttgatacaatttttttttctttaaatatttgatagaattctgcagtgaattctgcagtcgacggtaccgcgggcccgggatccaccggatctagataactgatcataatcagccataccacatttgtagaggttttacttgctttaaaaaacctcccacacctccccctgaacctgaaacataaaatgaatgcaattgttgttgttaacttgtttattgcagcttataatggttacaaataaagcaatagcatcacaaatttcacaaataaagcatttttttcactgcattctagttgtggtttgtccaaactcatcaatgtatcttaacgcgtaaattgtaagcgttaatattttgttaaaattcgcgttaaatttttgttaaatcagctcattttttaaccaataggccgaaatcggcgcggaacccctatttgtttatttttctaaatacattcaaatatgtatccgctcatgagacaataaccctgataaatgcttcaataatattgaaaaaggaagagtcaggatgaggatcgtttcgcatgattgaacaagatggattgcacgcaggttctccggccgcttgggtggagaggctattcggctatgactgggcacaacagacaatcggctgctctgatgccgccgtgttccggctgtcagcgcaggggcgcccggttctttttgtcaagaccgacctgtccggtgccctgaatgaactgcaagacgaggcagcgcggctatcgtggctggccacgacgggcgttccttgcgcagctgtgctcgacgttgtcactgaagcgggaagggactggctgctattgggcgaagtgccggggcaggatctcctgtcatctcaccttgctcctgccgagaaagtatccatcatggctgatgcaatgcggcggctgcatacgcttgatccggctacctgcccattcgaccaccaagcgaaacatcgcatcgagcgagcacgtactcggatggaagccggtcttgtcgatcaggatgatctggacgaagagcatcaggggctcgcgccagccgaactgttcgccaggctcaaggcgagcatgcccgacggcgaggatctcgtcgtgacccatggcgatgcctgcttgccgaatatcatggtggaaaatggccgcttttctggattcatcgactgtggccggctgggtgtggcggaccgctatcaggacatagcgttggctacccgtgatattgctgaagagcttggcggcgaatgggctgaccgcttcctcgtgctttacggtatcgccgctcccgattcgcagcgcatcgccttctatcgccttcttgacgagttcttctgagcgggactctggggttcgaaatgaccgaccaagcgacgcccaacctgccatcacgagatttcgattccaccgccgccttctatgaaaggttgggcttcggaatcgttttccgggacgccggctggatgatcctccagcgcggggatctcatgctggagttcttcgcccaccctagggggaggctaactgaaacacggaaggagacaataccggaaggaacccgcgctatgacggcaataaaaagacagaataaaacgcacggtgttgggtcgtttgttcataaacgcggggttcggtcccagggctggcactctgtcgataccccaccgagaccccattggggccaatacgcccgcgtttcttccttttccccaccccaccccccaagttcgggtgaaggcccagggctcgcagccaacgtcggggcggcaggccctgccatagcctcaggttactcatatatactttagattgatttaaaacttcatttttaatttaaaaggatctaggtgaagatcctttttgataatctcatgaccaaaatcccttaacgtgagttttcgttccactgagcgtcagaccccgtagaaaagatcaaaggatcttcttgagatcctttttttctgcgcgtaatctgctgcttgcaaacaaaaaaaccaccgctaccagcggtggtttgtttgccggatcaagagctaccaactctttttccgaaggtaactggcttcagcagagcgcagataccaaatactgtccttctagtgtagccgtagttaggccaccacttcaagaactctgtagcaccgcctacatacctcgctctgctaatcctgttaccagtggctgctgccagtggcgataagtcgtgtcttaccgggttggactcaagacgatagttaccggataaggcgcagcggtcgggctgaacggggggttcgtgcacacagcccagcttggagcgaacgacctacaccgaactgagatacctacagcgtgagctatgagaaagcgccacgcttcccgaagggagaaaggcggacaggtatccggtaagcggcagggtcggaacaggagagcgcacgagggagcttccagggggaaacgcctggtatctttatagtcctgtcgggtttcgccacctctgacttgagcgtcgatttttgtgatgctcgtcaggggggcggagcctatggaaaaacgccagcaacgcggcctttttacggttcctggccttttgctggccttttgctcacatgttctttcctgcgttatcccctgattctgctagcttaagcggccgcgattactttcctcccagccaaccgcccaagccacaccaacctccgcaatagaaaacgctcggagaacacgatctcccgcccagctcttttcaactccccgcggaagtgctcacaccggaacccctctgtgtccgcactttgccattggccgaggcttccgcccgcttccattcgcttcctcccacaactcagtcgggctgcgcggtccgtaggagtcacttccgcctcgtcccaccccgccccccggtccctttctagcagcttccggcttcggtcccgccccgccccctgtggccccgccccgcccccgcccccgcccctggctggcggtccagccccgcggcgccgcttccggtgcgggccccgccccggctgtggcccccggctgcggaggagtccgagacgcagctgccgcgccggggcctgagctgccgcctcctccgccgcccgaaaacccggagtgccccgcacaggtaagtggcccgggtccgggctccctcaggcatggcgggagaggaggctgcgacaggtggaggggccgaggccaggagccgaggcaggtgtagagagagaggggaatgcgcgagtcgggggcgcggggaccgcgaaggaaagtgagagcgccgcgggagccccgagcgccctgtgcccattagggcatttgagataaagcgtttgagataaagcgatgagaagggtgaggggccctggagctgagtgggcgcgcagataggtggggcgggggccatcggaagagccagcggattggctgggagggttggtagaggtaaaaatgatagggctgaatggggggaggtgaataaagaatggggggaggcgtgcaggggtgaccgggaaggtgggctgtggggcttacaggggcccggggccaaaagaatccggcagcaaaagcaggggaatggtcagcaggccgggttcaaagctgcaggtagtccgttgtacccggcttggtggtccgggaactttaggggaaatgggggaggggcccgtgtgaagggatgaagaggtttagatttgagacataagttctccaaatgtaggcaggtggcattgtttggatcgctggctgcttagggactgcgggaaaatgggctctttggggatctcgagagctcaagcttactagtgtggataaccgtattaccgccatgcat

SEQ ID NO: 43308 - DNA, 5659 bp, ARTIFICIAL SEQUENCE
  vector containing human replication origin
tagttattaatagtaatcaattacggggtcattagttcatagcccatatatggagttccgcgttacataacttacggtaaatggcccgcctggctgaccgcccaacgacccccgcccattgacgtcaataatgacgtatgttcccatagtaacgccaatagggactttccattgacgtcaatgggtggagtatttacggtaaactgcccacttggcagtacatcaagtgtatcatatgccaagtacgccccctattgacgtcaatgacggtaaatggcccgcctggcattatgcccagtacatgaccttatgggactttcctacttggcagtacatctacgtattagtcatcgctattaccatggtgatgcggttttggcagtacatcaatgggcgtggatagcggtttgactcacggggatttccaagtctccaccccattgacgtcaatgggagtttgttttggcaccaaaatcaacgggactttccaaaatgtcgtaacaactccgccccattgacgcaaatgggcggtaggcgtgtacggtgggaggtctatataagcagagctggtttagtgaaccgtcagatccgctagagcatgaccgagtacaagcccacggtgcgcctcgccacccgcgacgacgtcccccgggccgtacgcaccctcgccgccgcgttcgccgactaccccgccacgcgccacaccgtcgacccggaccgccacatcgagcgggtcaccgagctgcaagaactcttcctcacgcgcgtcgggctcgacatcggcaaggtgtgggtcgcggacgacggcgccgcggtggcggtctggaccacgccggagagcgtcgaagcgggggcggtgttcgccgagatcggcccgcgcatggccgagttgagcggttcccggctggccgcgcagcaacagatggaaggcctcctggcgccgcaccggcccaaggagcccgcgtggttcctggccaccgtcggcgtctcgcccgaccaccagggcaagggtctgggcagcgccgtcgtgctccccggagtggaggcggccgagcgcgccggggtgcccgccttcctggagacctccgcgccccgcaacctccccttctacgagcggctcggcttcaccgtcaccgccgacgtcgaggtgcccgaaggaccgcgcacctggtgcatgacccgcaagcccggtgcctagctgattggtctaaaatgagatacatcaacgctcctccatgttttttgttttctttttaaatgaaaaactttattttttaagaggagtttcaggttcatagcaaaattgagaggaaggtacattcaagctgaggaagttttcctctattcctagtttactgagagattgcatcatgaatgggtgttaaattttgtcaaatgctttttctgtgtctatcaatatgaccatgtgattttcttctttaacctgttgatgggacaaattacgttaattgattttcaaacgttgaaccacccttacatatctggaataaattctacttggttgtggtgtatattttttgatacattcttggattctttttgctaatattttgttgaaaatgtttgtatctttgttcatgagagatattggtctgttgttttcttttcttgtaatgtcattttctagttccggtattaaggtaatgctggcctagttgaatgatttaggaagtattccctctgcttctgtcttctgaaagagattgtagaaagttgatacaatttttttttctttaaatatttgatagaattctgcagtgaattctgcagtcgacggtaccgcgggcccgggatccaccggatctagataactgatcataatcagccataccacatttgtagaggttttacttgctttaaaaaacctcccacacctccccctgaacctgaaacataaaatgaatgcaattgttgttgttaacttgtttattgcagcttataatggttacaaataaagcaatagcatcacaaatttcacaaataaagcatttttttcactgcattctagttgtggtttgtccaaactcatcaatgtatcttaacgcgtaaattgtaagcgttaatattttgttaaaattcgcgttaaatttttgttaaatcagctcattttttaaccaataggccgaaatcggcgcggaacccctatttgtttatttttctaaatacattcaaatatgtatccgctcatgagacaataaccctgataaatgcttcaataatattgaaaaaggaagagtcaggatgaggatcgtttcgcatgattgaacaagatggattgcacgcaggttctccggccgcttgggtggagaggctattcggctatgactgggcacaacagacaatcggctgctctgatgccgccgtgttccggctgtcagcgcaggggcgcccggttctttttgtcaagaccgacctgtccggtgccctgaatgaactgcaagacgaggcagcgcggctatcgtggctggccacgacgggcgttccttgcgcagctgtgctcgacgttgtcactgaagcgggaagggactggctgctattgggcgaagtgccggggcaggatctcctgtcatctcaccttgctcctgccgagaaagtatccatcatggctgatgcaatgcggcggctgcatacgcttgatccggctacctgcccattcgaccaccaagcgaaacatcgcatcgagcgagcacgtactcggatggaagccggtcttgtcgatcaggatgatctggacgaagagcatcaggggctcgcgccagccgaactgttcgccaggctcaaggcgagcatgcccgacggcgaggatctcgtcgtgacccatggcgatgcctgcttgccgaatatcatggtggaaaatggccgcttttctggattcatcgactgtggccggctgggtgtggcggaccgctatcaggacatagcgttggctacccgtgatattgctgaagagcttggcggcgaatgggctgaccgcttcctcgtgctttacggtatcgccgctcccgattcgcagcgcatcgccttctatcgccttcttgacgagttcttctgagcgggactctggggttcgaaatgaccgaccaagcgacgcccaacctgccatcacgagatttcgattccaccgccgccttctatgaaaggttgggcttcggaatcgttttccgggacgccggctggatgatcctccagcgcggggatctcatgctggagttcttcgcccaccctagggggaggctaactgaaacacggaaggagacaataccggaaggaacccgcgctatgacggcaataaaaagacagaataaaacgcacggtgttgggtcgtttgttcataaacgcggggttcggtcccagggctggcactctgtcgataccccaccgagaccccattggggccaatacgcccgcgtttcttccttttccccaccccaccccccaagttcgggtgaaggcccagggctcgcagccaacgtcggggcggcaggccctgccatagcctcaggttactcatatatactttagattgatttaaaacttcatttttaatttaaaaggatctaggtgaagatcctttttgataatctcatgaccaaaatcccttaacgtgagttttcgttccactgagcgtcagaccccgtagaaaagatcaaaggatcttcttgagatcctttttttctgcgcgtaatctgctgcttgcaaacaaaaaaaccaccgctaccagcggtggtttgtttgccggatcaagagctaccaactctttttccgaaggtaactggcttcagcagagcgcagataccaaatactgtccttctagtgtagccgtagttaggccaccacttcaagaactctgtagcaccgcctacatacctcgctctgctaatcctgttaccagtggctgctgccagtggcgataagtcgtgtcttaccgggttggactcaagacgatagttaccggataaggcgcagcggtcgggctgaacggggggttcgtgcacacagcccagcttggagcgaacgacctacaccgaactgagatacctacagcgtgagctatgagaaagcgccacgcttcccgaagggagaaaggcggacaggtatccggtaagcggcagggtcggaacaggagagcgcacgagggagcttccagggggaaacgcctggtatctttatagtcctgtcgggtttcgccacctctgacttgagcgtcgatttttgtgatgctcgtcaggggggcggagcctatggaaaaacgccagcaacgcggcctttttacggttcctggccttttgctggccttttgctcacatgttctttcctgcgttatcccctgattctgctagcttaagcggccgcgatcaactttctcctttactcttggtacttcttgagctccaggcctacttttctctctctcactgccaaacatttgaaatcatcaccctttattaactccattgcttcattggctaacatactctttagacaagctcttcaactcagttctgtgcctggtgcacagcaggctccggctgcatgttagttccagccatcttgcacatttgcatctccttcctggagaaggaatttctccatggttagcagtgtgtgctcactcctagtcaccagggcctcatctccgtgttcccacaccctgaccttgctgccgccctaatgctgcggacccagtttccaggtacgccgggttcttggaaggtcctgccggtcaccctcccagccttctgccagactcactgagttctcaccctgcacagtcatcgtttccccagtaaccctgagagatctcccagtctacctcttcgaggcacccgttgccagtcctccatctctgtttgccgcgcgtccctcggttaccccagaggcaacacgtcaggctgccccgcacctccaagcctgcgcgaatgtccttgtagccagctatgaccaaacatttagggcgcacctgagcgccaggcccacgccacccctgcttgctttcacttaacagcctcgactaggccccctatgcgccaggtctcagtgaagaggacgcagtcccgggtcctgggcgctctttgccgggcgagacagctgcgtaggcagatcctgttcctctagtgggcggcctcggcccctgcccctgccccgaggcgcgtcagaggacaagaggcccaggtcgctggcagcggctgcctgcccgaccgcacagggtgcctagcacgggtggcggggactggagccgggcgggggccggccggggtcgggggtccagccctgagcggcgccgtccccgccccgccccgtcccgtcgcgtcccgccccgccctacccgccgccgccgtcgtcgccgtcgccgggcctgcgccgcgcagcccgcctcgggcgggaggcgggaggcgggaggccgggcccaggccggggcagcccctccaccgcaccgtcctgggccggtgcccaggtccgagtcgccttccgcctgcccccccccccccccaatcccccgccgcggcagccccagccaggtcccgccgccaggccggctcccgcccccgctccgcccccggagccgcagccccgcccgccatcgccatctcgagagctcaagcttactagtgtggataaccgtattaccgccatgcat

SEQ ID NO: 43309 - DNA, 5729 bp, ARTIFICIAL SEQUENCE
  vector containing human replication origin
tagttattaatagtaatcaattacggggtcattagttcatagcccatatatggagttccgcgttacataacttacggtaaatggcccgcctggctgaccgcccaacgacccccgcccattgacgtcaataatgacgtatgttcccatagtaacgccaatagggactttccattgacgtcaatgggtggagtatttacggtaaactgcccacttggcagtacatcaagtgtatcatatgccaagtacgccccctattgacgtcaatgacggtaaatggcccgcctggcattatgcccagtacatgaccttatgggactttcctacttggcagtacatctacgtattagtcatcgctattaccatggtgatgcggttttggcagtacatcaatgggcgtggatagcggtttgactcacggggatttccaagtctccaccccattgacgtcaatgggagtttgttttggcaccaaaatcaacgggactttccaaaatgtcgtaacaactccgccccattgacgcaaatgggcggtaggcgtgtacggtgggaggtctatataagcagagctggtttagtgaaccgtcagatccgctagagcatgaccgagtacaagcccacggtgcgcctcgccacccgcgacgacgtcccccgggccgtacgcaccctcgccgccgcgttcgccgactaccccgccacgcgccacaccgtcgacccggaccgccacatcgagcgggtcaccgagctgcaagaactcttcctcacgcgcgtcgggctcgacatcggcaaggtgtgggtcgcggacgacggcgccgcggtggcggtctggaccacgccggagagcgtcgaagcgggggcggtgttcgccgagatcggcccgcgcatggccgagttgagcggttcccggctggccgcgcagcaacagatggaaggcctcctggcgccgcaccggcccaaggagcccgcgtggttcctggccaccgtcggcgtctcgcccgaccaccagggcaagggtctgggcagcgccgtcgtgctccccggagtggaggcggccgagcgcgccggggtgcccgccttcctggagacctccgcgccccgcaacctccccttctacgagcggctcggcttcaccgtcaccgccgacgtcgaggtgcccgaaggaccgcgcacctggtgcatgacccgcaagcccggtgcctagctgattggtctaaaatgagatacatcaacgctcctccatgttttttgttttctttttaaatgaaaaactttattttttaagaggagtttcaggttcatagcaaaattgagaggaaggtacattcaagctgaggaagttttcctctattcctagtttactgagagattgcatcatgaatgggtgttaaattttgtcaaatgctttttctgtgtctatcaatatgaccatgtgattttcttctttaacctgttgatgggacaaattacgttaattgattttcaaacgttgaaccacccttacatatctggaataaattctacttggttgtggtgtatattttttgatacattcttggattctttttgctaatattttgttgaaaatgtttgtatctttgttcatgagagatattggtctgttgttttcttttcttgtaatgtcattttctagttccggtattaaggtaatgctggcctagttgaatgatttaggaagtattccctctgcttctgtcttctgaaagagattgtagaaagttgatacaatttttttttctttaaatatttgatagaattctgcagtgaattctgcagtcgacggtaccgcgggcccgggatccaccggatctagataactgatcataatcagccataccacatttgtagaggttttacttgctttaaaaaacctcccacacctccccctgaacctgaaacataaaatgaatgcaattgttgttgttaacttgtttattgcagcttataatggttacaaataaagcaatagcatcacaaatttcacaaataaagcatttttttcactgcattctagttgtggtttgtccaaactcatcaatgtatcttaacgcgtaaattgtaagcgttaatattttgttaaaattcgcgttaaatttttgttaaatcagctcattttttaaccaataggccgaaatcggcgcggaacccctatttgtttatttttctaaatacattcaaatatgtatccgctcatgagacaataaccctgataaatgcttcaataatattgaaaaaggaagagtcaggatgaggatcgtttcgcatgattgaacaagatggattgcacgcaggttctccggccgcttgggtggagaggctattcggctatgactgggcacaacagacaatcggctgctctgatgccgccgtgttccggctgtcagcgcaggggcgcccggttctttttgtcaagaccgacctgtccggtgccctgaatgaactgcaagacgaggcagcgcggctatcgtggctggccacgacgggcgttccttgcgcagctgtgctcgacgttgtcactgaagcgggaagggactggctgctattgggcgaagtgccggggcaggatctcctgtcatctcaccttgctcctgccgagaaagtatccatcatggctgatgcaatgcggcggctgcatacgcttgatccggctacctgcccattcgaccaccaagcgaaacatcgcatcgagcgagcacgtactcggatggaagccggtcttgtcgatcaggatgatctggacgaagagcatcaggggctcgcgccagccgaactgttcgccaggctcaaggcgagcatgcccgacggcgaggatctcgtcgtgacccatggcgatgcctgcttgccgaatatcatggtggaaaatggccgcttttctggattcatcgactgtggccggctgggtgtggcggaccgctatcaggacatagcgttggctacccgtgatattgctgaagagcttggcggcgaatgggctgaccgcttcctcgtgctttacggtatcgccgctcccgattcgcagcgcatcgccttctatcgccttcttgacgagttcttctgagcgggactctggggttcgaaatgaccgaccaagcgacgcccaacctgccatcacgagatttcgattccaccgccgccttctatgaaaggttgggcttcggaatcgttttccgggacgccggctggatgatcctccagcgcggggatctcatgctggagttcttcgcccaccctagggggaggctaactgaaacacggaaggagacaataccggaaggaacccgcgctatgacggcaataaaaagacagaataaaacgcacggtgttgggtcgtttgttcataaacgcggggttcggtcccagggctggcactctgtcgataccccaccgagaccccattggggccaatacgcccgcgtttcttccttttccccaccccaccccccaagttcgggtgaaggcccagggctcgcagccaacgtcggggcggcaggccctgccatagcctcaggttactcatatatactttagattgatttaaaacttcatttttaatttaaaaggatctaggtgaagatcctttttgataatctcatgaccaaaatcccttaacgtgagttttcgttccactgagcgtcagaccccgtagaaaagatcaaaggatcttcttgagatcctttttttctgcgcgtaatctgctgcttgcaaacaaaaaaaccaccgctaccagcggtggtttgtttgccggatcaagagctaccaactctttttccgaaggtaactggcttcagcagagcgcagataccaaatactgtccttctagtgtagccgtagttaggccaccacttcaagaactctgtagcaccgcctacatacctcgctctgctaatcctgttaccagtggctgctgccagtggcgataagtcgtgtcttaccgggttggactcaagacgatagttaccggataaggcgcagcggtcgggctgaacggggggttcgtgcacacagcccagcttggagcgaacgacctacaccgaactgagatacctacagcgtgagctatgagaaagcgccacgcttcccgaagggagaaaggcggacaggtatccggtaagcggcagggtcggaacaggagagcgcacgagggagcttccagggggaaacgcctggtatctttatagtcctgtcgggtttcgccacctctgacttgagcgtcgatttttgtgatgctcgtcaggggggcggagcctatggaaaaacgccagcaacgcggcctttttacggttcctggccttttgctggccttttgctcacatgttctttcctgcgttatcccctgattctgctagcttaagcggccgcgatcccgctccgcccccggagccgcagccccgcccgccatcgccgtcgccatgttgtggctcccgcagccggcgctggggacgcgcgcggccgagactctggcctgcagtcgccgccgccgccgccaggtaagcgccccccgcgggccgggccgagcggggcctgcgggccggggcagccccagcctgggcccgggaggatcgcagccgggaccgagtccgagcccgagccggggcccggccctgcagcctggcggaccctggccgccgccagaggcggcagccacttcccccgaccgccgcctggcgggcccgggccgccaccccaccccgcccccggccgtcgggcgccggccccttccgccgctgcgaccgccgctgcgaccgccgctccttggcaggccgggcacgctgctgtcctccgcgctgggcgggacgtgcggccgccctcggcgatagccggcggcccccagcccgggcacggataacggtgccactttctccctctgggacggcctgtcagcccgaccgtccccgccgcccgaagagctgtcgccgtcacagggcagacacttcggggaacgaccctctttggcgctcctcagtactcccctcccctgagcccaagttctgaccctgaggaaggtttctcccggagcagacaggtattcctagagctccagagttggggtcctcaggggtgaccaggcctgttgatcagggtgaaaattgtctctctgcaagggctcttcctgccaacgagggggttggcgggaggctcagtgtgacctgagggaggacaggagagcgtctgctggacagatggcctcctggccttggatcagcgtttgtgagggggaggggtccgtatgaccttaggtatgcctgctcctgagtactgcaggattattgaagctgtttagggattttaaaccattttttgagtaggccaaaggtggcattaaaggtcctggattggaataagtccacaggcccacccagggaagcatgtttggcatccaggactagtctagaataggactggcagtagaagaatgggacttggggagtaagacggtatttggcttatggtttgcccacttgagttcaggcctgtgctcatggagggcctgtagggtgcttctgtcgcgggtgcagtgtggtgcacagtgtggcagagtgcggaggatgtggacagacagattcctggcctggtggatgcttggtggtattttagtagtctgtttcctcaacctcactgttacgttacacagtgaaaggggcagaagtgtggtgctagtgcgatctcgagagctcaagcttactagtgtggataaccgtattaccgccatgcat

SEQ ID NO: 43310 - DNA, 5629 bp, ARTIFICIAL SEQUENCE
  vector containing human replication origin
tagttattaatagtaatcaattacggggtcattagttcatagcccatatatggagttccgcgttacataacttacggtaaatggcccgcctggctgaccgcccaacgacccccgcccattgacgtcaataatgacgtatgttcccatagtaacgccaatagggactttccattgacgtcaatgggtggagtatttacggtaaactgcccacttggcagtacatcaagtgtatcatatgccaagtacgccccctattgacgtcaatgacggtaaatggcccgcctggcattatgcccagtacatgaccttatgggactttcctacttggcagtacatctacgtattagtcatcgctattaccatggtgatgcggttttggcagtacatcaatgggcgtggatagcggtttgactcacggggatttccaagtctccaccccattgacgtcaatgggagtttgttttggcaccaaaatcaacgggactttccaaaatgtcgtaacaactccgccccattgacgcaaatgggcggtaggcgtgtacggtgggaggtctatataagcagagctggtttagtgaaccgtcagatccgctagagcatgaccgagtacaagcccacggtgcgcctcgccacccgcgacgacgtcccccgggccgtacgcaccctcgccgccgcgttcgccgactaccccgccacgcgccacaccgtcgacccggaccgccacatcgagcgggtcaccgagctgcaagaactcttcctcacgcgcgtcgggctcgacatcggcaaggtgtgggtcgcggacgacggcgccgcggtggcggtctggaccacgccggagagcgtcgaagcgggggcggtgttcgccgagatcggcccgcgcatggccgagttgagcggttcccggctggccgcgcagcaacagatggaaggcctcctggcgccgcaccggcccaaggagcccgcgtggttcctggccaccgtcggcgtctcgcccgaccaccagggcaagggtctgggcagcgccgtcgtgctccccggagtggaggcggccgagcgcgccggggtgcccgccttcctggagacctccgcgccccgcaacctccccttctacgagcggctcggcttcaccgtcaccgccgacgtcgaggtgcccgaaggaccgcgcacctggtgcatgacccgcaagcccggtgcctagctgattggtctaaaatgagatacatcaacgctcctccatgttttttgttttctttttaaatgaaaaactttattttttaagaggagtttcaggttcatagcaaaattgagaggaaggtacattcaagctgaggaagttttcctctattcctagtttactgagagattgcatcatgaatgggtgttaaattttgtcaaatgctttttctgtgtctatcaatatgaccatgtgattttcttctttaacctgttgatgggacaaattacgttaattgattttcaaacgttgaaccacccttacatatctggaataaattctacttggttgtggtgtatattttttgatacattcttggattctttttgctaatattttgttgaaaatgtttgtatctttgttcatgagagatattggtctgttgttttcttttcttgtaatgtcattttctagttccggtattaaggtaatgctggcctagttgaatgatttaggaagtattccctctgcttctgtcttctgaaagagattgtagaaagttgatacaatttttttttctttaaatatttgatagaattctgcagtgaattctgcagtcgacggtaccgcgggcccgggatccaccggatctagataactgatcataatcagccataccacatttgtagaggttttacttgctttaaaaaacctcccacacctccccctgaacctgaaacataaaatgaatgcaattgttgttgttaacttgtttattgcagcttataatggttacaaataaagcaatagcatcacaaatttcacaaataaagcatttttttcactgcattctagttgtggtttgtccaaactcatcaatgtatcttaacgcgtaaattgtaagcgttaatattttgttaaaattcgcgttaaatttttgttaaatcagctcattttttaaccaataggccgaaatcggcgcggaacccctatttgtttatttttctaaatacattcaaatatgtatccgctcatgagacaataaccctgataaatgcttcaataatattgaaaaaggaagagtcaggatgaggatcgtttcgcatgattgaacaagatggattgcacgcaggttctccggccgcttgggtggagaggctattcggctatgactgggcacaacagacaatcggctgctctgatgccgccgtgttccggctgtcagcgcaggggcgcccggttctttttgtcaagaccgacctgtccggtgccctgaatgaactgcaagacgaggcagcgcggctatcgtggctggccacgacgggcgttccttgcgcagctgtgctcgacgttgtcactgaagcgggaagggactggctgctattgggcgaagtgccggggcaggatctcctgtcatctcaccttgctcctgccgagaaagtatccatcatggctgatgcaatgcggcggctgcatacgcttgatccggctacctgcccattcgaccaccaagcgaaacatcgcatcgagcgagcacgtactcggatggaagccggtcttgtcgatcaggatgatctggacgaagagcatcaggggctcgcgccagccgaactgttcgccaggctcaaggcgagcatgcccgacggcgaggatctcgtcgtgacccatggcgatgcctgcttgccgaatatcatggtggaaaatggccgcttttctggattcatcgactgtggccggctgggtgtggcggaccgctatcaggacatagcgttggctacccgtgatattgctgaagagcttggcggcgaatgggctgaccgcttcctcgtgctttacggtatcgccgctcccgattcgcagcgcatcgccttctatcgccttcttgacgagttcttctgagcgggactctggggttcgaaatgaccgaccaagcgacgcccaacctgccatcacgagatttcgattccaccgccgccttctatgaaaggttgggcttcggaatcgttttccgggacgccggctggatgatcctccagcgcggggatctcatgctggagttcttcgcccaccctagggggaggctaactgaaacacggaaggagacaataccggaaggaacccgcgctatgacggcaataaaaagacagaataaaacgcacggtgttgggtcgtttgttcataaacgcggggttcggtcccagggctggcactctgtcgataccccaccgagaccccattggggccaatacgcccgcgtttcttccttttccccaccccaccccccaagttcgggtgaaggcccagggctcgcagccaacgtcggggcggcaggccctgccatagcctcaggttactcatatatactttagattgatttaaaacttcatttttaatttaaaaggatctaggtgaagatcctttttgataatctcatgaccaaaatcccttaacgtgagttttcgttccactgagcgtcagaccccgtagaaaagatcaaaggatcttcttgagatcctttttttctgcgcgtaatctgctgcttgcaaacaaaaaaaccaccgctaccagcggtggtttgtttgccggatcaagagctaccaactctttttccgaaggtaactggcttcagcagagcgcagataccaaatactgtccttctagtgtagccgtagttaggccaccacttcaagaactctgtagcaccgcctacatacctcgctctgctaatcctgttaccagtggctgctgccagtggcgataagtcgtgtcttaccgggttggactcaagacgatagttaccggataaggcgcagcggtcgggctgaacggggggttcgtgcacacagcccagcttggagcgaacgacctacaccgaactgagatacctacagcgtgagctatgagaaagcgccacgcttcccgaagggagaaaggcggacaggtatccggtaagcggcagggtcggaacaggagagcgcacgagggagcttccagggggaaacgcctggtatctttatagtcctgtcgggtttcgccacctctgacttgagcgtcgatttttgtgatgctcgtcaggggggcggagcctatggaaaaacgccagcaacgcggcctttttacggttcctggccttttgctggccttttgctcacatgttctttcctgcgttatcccctgattctgctagcttaagcggccgcgatcagtccacgacccggcggccccgcggctccacggcgcggaccctcctgcgcctgctgctcaggctgctgctgttcctcggcttgctcgccctggccctgcacttcctaggcctgcagcctctgcacgccgccgtggagcgcctgtgaccgtccgccgtccgccgcccgctagggtcggccccgctgcaccctcgcccacgcccggctccctgggcttgtaccagcccctgccccgccttctgggtttgagcgcgcctccgctccgccccttgaatcctggtcacgcccccgagccgctctccagacctagcccggaccgccgacttctggccacgcccctatctactcccagaccttgccttgcgcccttcctgtgttttggccccgcccctgtcctgtcccgccccgccctccgaagtgggcacgctcctgctccgccccctgaatcctggccacgtccctggtcggcccagacgcgtagccccgagtctctttccatgttttgaccacgcccttgacccgcccttcaaattgggcacgccttcttccccgctcactgatttcctggcctagcccctgagcagacctccagacctagccccgcccccgttttataaccccgcccctgcttcacggcttgggcacgcctcttccccgccccctgacttcagagcctagtcctgagccgctctccaggcctaaccccgccttcatgtcatagccacgccccttcccgcccttccatgtttgggcacgccttctgagtcctggtcacgcctctgtcccgccccctgaatctttcctacgtccatgaccctccctccaggccctggccctgccccttttttcctccctccggcctgtccggtttctgatatgggccaaggctcacagcttcctccgccttctggaccttctcctagtccctgcccagtcccggcccacccccagattctccctcattctggtttcgccccctttctggtcctccccgcgcgcttgagcccaccctttggcttctccttttgggtctgtccttgctcctgcctctggacccggtcccgcccttctcgcgtgtaattgagtcctggccccgccccctccctctctggcttcacccctttccagctccgcctcccgggtaggttctccccggaaccaggctgccgcgtcgctatgggctaacgcaggctcgggtgaatctcgagagctcaagcttactagtgtggataaccgtattaccgccatgcat

SEQ ID NO: 43311 - DNA, 5579 bp, ARTIFICIAL SEQUENCE
  vector containing human replication origin
tagttattaatagtaatcaattacggggtcattagttcatagcccatatatggagttccgcgttacataacttacggtaaatggcccgcctggctgaccgcccaacgacccccgcccattgacgtcaataatgacgtatgttcccatagtaacgccaatagggactttccattgacgtcaatgggtggagtatttacggtaaactgcccacttggcagtacatcaagtgtatcatatgccaagtacgccccctattgacgtcaatgacggtaaatggcccgcctggcattatgcccagtacatgaccttatgggactttcctacttggcagtacatctacgtattagtcatcgctattaccatggtgatgcggttttggcagtacatcaatgggcgtggatagcggtttgactcacggggatttccaagtctccaccccattgacgtcaatgggagtttgttttggcaccaaaatcaacgggactttccaaaatgtcgtaacaactccgccccattgacgcaaatgggcggtaggcgtgtacggtgggaggtctatataagcagagctggtttagtgaaccgtcagatccgctagagcatgaccgagtacaagcccacggtgcgcctcgccacccgcgacgacgtcccccgggccgtacgcaccctcgccgccgcgttcgccgactaccccgccacgcgccacaccgtcgacccggaccgccacatcgagcgggtcaccgagctgcaagaactcttcctcacgcgcgtcgggctcgacatcggcaaggtgtgggtcgcggacgacggcgccgcggtggcggtctggaccacgccggagagcgtcgaagcgggggcggtgttcgccgagatcggcccgcgcatggccgagttgagcggttcccggctggccgcgcagcaacagatggaaggcctcctggcgccgcaccggcccaaggagcccgcgtggttcctggccaccgtcggcgtctcgcccgaccaccagggcaagggtctgggcagcgccgtcgtgctccccggagtggaggcggccgagcgcgccggggtgcccgccttcctggagacctccgcgccccgcaacctccccttctacgagcggctcggcttcaccgtcaccgccgacgtcgaggtgcccgaaggaccgcgcacctggtgcatgacccgcaagcccggtgcctagctgattggtctaaaatgagatacatcaacgctcctccatgttttttgttttctttttaaatgaaaaactttattttttaagaggagtttcaggttcatagcaaaattgagaggaaggtacattcaagctgaggaagttttcctctattcctagtttactgagagattgcatcatgaatgggtgttaaattttgtcaaatgctttttctgtgtctatcaatatgaccatgtgattttcttctttaacctgttgatgggacaaattacgttaattgattttcaaacgttgaaccacccttacatatctggaataaattctacttggttgtggtgtatattttttgatacattcttggattctttttgctaatattttgttgaaaatgtttgtatctttgttcatgagagatattggtctgttgttttcttttcttgtaatgtcattttctagttccggtattaaggtaatgctggcctagttgaatgatttaggaagtattccctctgcttctgtcttctgaaagagattgtagaaagttgatacaatttttttttctttaaatatttgatagaattctgcagtgaattctgcagtcgacggtaccgcgggcccgggatccaccggatctagataactgatcataatcagccataccacatttgtagaggttttacttgctttaaaaaacctcccacacctccccctgaacctgaaacataaaatgaatgcaattgttgttgttaacttgtttattgcagcttataatggttacaaataaagcaatagcatcacaaatttcacaaataaagcatttttttcactgcattctagttgtggtttgtccaaactcatcaatgtatcttaacgcgtaaattgtaagcgttaatattttgttaaaattcgcgttaaatttttgttaaatcagctcattttttaaccaataggccgaaatcggcgcggaacccctatttgtttatttttctaaatacattcaaatatgtatccgctcatgagacaataaccctgataaatgcttcaataatattgaaaaaggaagagtcaggatgaggatcgtttcgcatgattgaacaagatggattgcacgcaggttctccggccgcttgggtggagaggctattcggctatgactgggcacaacagacaatcggctgctctgatgccgccgtgttccggctgtcagcgcaggggcgcccggttctttttgtcaagaccgacctgtccggtgccctgaatgaactgcaagacgaggcagcgcggctatcgtggctggccacgacgggcgttccttgcgcagctgtgctcgacgttgtcactgaagcgggaagggactggctgctattgggcgaagtgccggggcaggatctcctgtcatctcaccttgctcctgccgagaaagtatccatcatggctgatgcaatgcggcggctgcatacgcttgatccggctacctgcccattcgaccaccaagcgaaacatcgcatcgagcgagcacgtactcggatggaagccggtcttgtcgatcaggatgatctggacgaagagcatcaggggctcgcgccagccgaactgttcgccaggctcaaggcgagcatgcccgacggcgaggatctcgtcgtgacccatggcgatgcctgcttgccgaatatcatggtggaaaatggccgcttttctggattcatcgactgtggccggctgggtgtggcggaccgctatcaggacatagcgttggctacccgtgatattgctgaagagcttggcggcgaatgggctgaccgcttcctcgtgctttacggtatcgccgctcccgattcgcagcgcatcgccttctatcgccttcttgacgagttcttctgagcgggactctggggttcgaaatgaccgaccaagcgacgcccaacctgccatcacgagatttcgattccaccgccgccttctatgaaaggttgggcttcggaatcgttttccgggacgccggctggatgatcctccagcgcggggatctcatgctggagttcttcgcccaccctagggggaggctaactgaaacacggaaggagacaataccggaaggaacccgcgctatgacggcaataaaaagacagaataaaacgcacggtgttgggtcgtttgttcataaacgcggggttcggtcccagggctggcactctgtcgataccccaccgagaccccattggggccaatacgcccgcgtttcttccttttccccaccccaccccccaagttcgggtgaaggcccagggctcgcagccaacgtcggggcggcaggccctgccatagcctcaggttactcatatatactttagattgatttaaaacttcatttttaatttaaaaggatctaggtgaagatcctttttgataatctcatgaccaaaatcccttaacgtgagttttcgttccactgagcgtcagaccccgtagaaaagatcaaaggatcttcttgagatcctttttttctgcgcgtaatctgctgcttgcaaacaaaaaaaccaccgctaccagcggtggtttgtttgccggatcaagagctaccaactctttttccgaaggtaactggcttcagcagagcgcagataccaaatactgtccttctagtgtagccgtagttaggccaccacttcaagaactctgtagcaccgcctacatacctcgctctgctaatcctgttaccagtggctgctgccagtggcgataagtcgtgtcttaccgggttggactcaagacgatagttaccggataaggcgcagcggtcgggctgaacggggggttcgtgcacacagcccagcttggagcgaacgacctacaccgaactgagatacctacagcgtgagctatgagaaagcgccacgcttcccgaagggagaaaggcggacaggtatccggtaagcggcagggtcggaacaggagagcgcacgagggagcttccagggggaaacgcctggtatctttatagtcctgtcgggtttcgccacctctgacttgagcgtcgatttttgtgatgctcgtcaggggggcggagcctatggaaaaacgccagcaacgcggcctttttacggttcctggccttttgctggccttttgctcacatgttctttcctgcgttatcccctgattctgctagcttaagcggccgcgatcaatcgaatactaagcggcaaaaaagttgtgggagacggcctctctccaaccggaatgtccaaagacacctgagtgccgaaaattcccccatactcaacgtctgaattctcccctctgccctctcctcttcgtcggaagaaaatccgctaacaatcccatgcctgaccaagtgggaaaagctttcaacttcactctacttcgtccaaccctcgggataacgcactcccagatcccgacctccccttgaacctgccctctgagatcttctagtttctcccgagggtccctcagaaaacccagcccgttcctccccactgccccttaaccccttcccctgccccaggccccgtccgcgccccagcgcagaccatcacccgccgcctccccgacccccttcccggagccctcaacgctggcctgcccctcggggcctcctcctcgcaaccccacgcgatgttcctcccgcccgcggccccctccccctccccgcgcctcaccactctccctcagcagcgctcccgcgagcaaggccgcgccccccaggcgctcgccctcgggggtccctggcggaggggcccctaggcccaccacgcccccgcggataaagggtgacgcagcggaccccgcccctgccccgcgggcccggccgcctcgctcacccacacgaagaggctgtctgagagcaggtactgggccacatcgcgggcccggggtcccccggcgctcggccgggcgggcgccggcggctcaggctgcagcgaggccgttagctggtccggctcgccggggccggcctcgggctggctgagcgcgcggtaggcgctgatgatggtgcccagcagggccaggccgctgaggcccgtgtaggtgcggaggctgggccaggggaagcgctcgaggaagagcagcggcatggcggcagcggcgacctctggcccccaggcttccctgcgctgcggccgggcctctgcggcggcctcgcgaacggcgcccacgggctctggcgtcgctgccgctgccgctgccgccgccgccgccgcgccgggccgggccgggccgctcctggctgctggcgccgctccgccccgcgctgctcccgctgctgcccctgccggcgcggaagagcctgggcgggctcgggacaggccgatctcgagagctcaagcttactagtgtggataaccgtattaccgccatgcat

SEQ ID NO: 43312 - DNA, 5509 bp, ARTIFICIAL SEQUENCE
  vector containing human replication origin
tagttattaatagtaatcaattacggggtcattagttcatagcccatatatggagttccgcgttacataacttacggtaaatggcccgcctggctgaccgcccaacgacccccgcccattgacgtcaataatgacgtatgttcccatagtaacgccaatagggactttccattgacgtcaatgggtggagtatttacggtaaactgcccacttggcagtacatcaagtgtatcatatgccaagtacgccccctattgacgtcaatgacggtaaatggcccgcctggcattatgcccagtacatgaccttatgggactttcctacttggcagtacatctacgtattagtcatcgctattaccatggtgatgcggttttggcagtacatcaatgggcgtggatagcggtttgactcacggggatttccaagtctccaccccattgacgtcaatgggagtttgttttggcaccaaaatcaacgggactttccaaaatgtcgtaacaactccgccccattgacgcaaatgggcggtaggcgtgtacggtgggaggtctatataagcagagctggtttagtgaaccgtcagatccgctagagcatgaccgagtacaagcccacggtgcgcctcgccacccgcgacgacgtcccccgggccgtacgcaccctcgccgccgcgttcgccgactaccccgccacgcgccacaccgtcgacccggaccgccacatcgagcgggtcaccgagctgcaagaactcttcctcacgcgcgtcgggctcgacatcggcaaggtgtgggtcgcggacgacggcgccgcggtggcggtctggaccacgccggagagcgtcgaagcgggggcggtgttcgccgagatcggcccgcgcatggccgagttgagcggttcccggctggccgcgcagcaacagatggaaggcctcctggcgccgcaccggcccaaggagcccgcgtggttcctggccaccgtcggcgtctcgcccgaccaccagggcaagggtctgggcagcgccgtcgtgctccccggagtggaggcggccgagcgcgccggggtgcccgccttcctggagacctccgcgccccgcaacctccccttctacgagcggctcggcttcaccgtcaccgccgacgtcgaggtgcccgaaggaccgcgcacctggtgcatgacccgcaagcccggtgcctagctgattggtctaaaatgagatacatcaacgctcctccatgttttttgttttctttttaaatgaaaaactttattttttaagaggagtttcaggttcatagcaaaattgagaggaaggtacattcaagctgaggaagttttcctctattcctagtttactgagagattgcatcatgaatgggtgttaaattttgtcaaatgctttttctgtgtctatcaatatgaccatgtgattttcttctttaacctgttgatgggacaaattacgttaattgattttcaaacgttgaaccacccttacatatctggaataaattctacttggttgtggtgtatattttttgatacattcttggattctttttgctaatattttgttgaaaatgtttgtatctttgttcatgagagatattggtctgttgttttcttttcttgtaatgtcattttctagttccggtattaaggtaatgctggcctagttgaatgatttaggaagtattccctctgcttctgtcttctgaaagagattgtagaaagttgatacaatttttttttctttaaatatttgatagaattctgcagtgaattctgcagtcgacggtaccgcgggcccgggatccaccggatctagataactgatcataatcagccataccacatttgtagaggttttacttgctttaaaaaacctcccacacctccccctgaacctgaaacataaaatgaatgcaattgttgttgttaacttgtttattgcagcttataatggttacaaataaagcaatagcatcacaaatttcacaaataaagcatttttttcactgcattctagttgtggtttgtccaaactcatcaatgtatcttaacgcgtaaattgtaagcgttaatattttgttaaaattcgcgttaaatttttgttaaatcagctcattttttaaccaataggccgaaatcggcgcggaacccctatttgtttatttttctaaatacattcaaatatgtatccgctcatgagacaataaccctgataaatgcttcaataatattgaaaaaggaagagtcaggatgaggatcgtttcgcatgattgaacaagatggattgcacgcaggttctccggccgcttgggtggagaggctattcggctatgactgggcacaacagacaatcggctgctctgatgccgccgtgttccggctgtcagcgcaggggcgcccggttctttttgtcaagaccgacctgtccggtgccctgaatgaactgcaagacgaggcagcgcggctatcgtggctggccacgacgggcgttccttgcgcagctgtgctcgacgttgtcactgaagcgggaagggactggctgctattgggcgaagtgccggggcaggatctcctgtcatctcaccttgctcctgccgagaaagtatccatcatggctgatgcaatgcggcggctgcatacgcttgatccggctacctgcccattcgaccaccaagcgaaacatcgcatcgagcgagcacgtactcggatggaagccggtcttgtcgatcaggatgatctggacgaagagcatcaggggctcgcgccagccgaactgttcgccaggctcaaggcgagcatgcccgacggcgaggatctcgtcgtgacccatggcgatgcctgcttgccgaatatcatggtggaaaatggccgcttttctggattcatcgactgtggccggctgggtgtggcggaccgctatcaggacatagcgttggctacccgtgatattgctgaagagcttggcggcgaatgggctgaccgcttcctcgtgctttacggtatcgccgctcccgattcgcagcgcatcgccttctatcgccttcttgacgagttcttctgagcgggactctggggttcgaaatgaccgaccaagcgacgcccaacctgccatcacgagatttcgattccaccgccgccttctatgaaaggttgggcttcggaatcgttttccgggacgccggctggatgatcctccagcgcggggatctcatgctggagttcttcgcccaccctagggggaggctaactgaaacacggaaggagacaataccggaaggaacccgcgctatgacggcaataaaaagacagaataaaacgcacggtgttgggtcgtttgttcataaacgcggggttcggtcccagggctggcactctgtcgataccccaccgagaccccattggggccaatacgcccgcgtttcttccttttccccaccccaccccccaagttcgggtgaaggcccagggctcgcagccaacgtcggggcggcaggccctgccatagcctcaggttactcatatatactttagattgatttaaaacttcatttttaatttaaaaggatctaggtgaagatcctttttgataatctcatgaccaaaatcccttaacgtgagttttcgttccactgagcgtcagaccccgtagaaaagatcaaaggatcttcttgagatcctttttttctgcgcgtaatctgctgcttgcaaacaaaaaaaccaccgctaccagcggtggtttgtttgccggatcaagagctaccaactctttttccgaaggtaactggcttcagcagagcgcagataccaaatactgtccttctagtgtagccgtagttaggccaccacttcaagaactctgtagcaccgcctacatacctcgctctgctaatcctgttaccagtggctgctgccagtggcgataagtcgtgtcttaccgggttggactcaagacgatagttaccggataaggcgcagcggtcgggctgaacggggggttcgtgcacacagcccagcttggagcgaacgacctacaccgaactgagatacctacagcgtgagctatgagaaagcgccacgcttcccgaagggagaaaggcggacaggtatccggtaagcggcagggtcggaacaggagagcgcacgagggagcttccagggggaaacgcctggtatctttatagtcctgtcgggtttcgccacctctgacttgagcgtcgatttttgtgatgctcgtcaggggggcggagcctatggaaaaacgccagcaacgcggcctttttacggttcctggccttttgctggccttttgctcacatgttctttcctgcgttatcccctgattctgctagcttaagcggccgcgatcacagcgcaggacccacacgagcccagaaccatcacggcctgctagttcccacccctcccgtcctggaggaccgtaggtggacgctcttgcagagcgcctctcgctggttggggcgggggtgggcggagccagcaccgtctgggctgtggaagcggagggggtggggacactctggcccggttctcggtggtgcgggagcgggcgggagcagcggccgctctggtcggcggacgtgctgccgagtagtcccggaagcgaagcagcgatggcggagagtccgactgaggaggcggcaacggcgggcgccggggcggcgggccccggggcgagcagcgttgctggtgttgttggcgttagcggcagcggcggcgggttcgggccgcctttcctgccggatgtgtgggcggcggcggcggcagcgggcggggccgggggcccggggagcggcctggctccgctgcccgggctcccgccctcagccgctgcccacggggccgcgctgcttagccactgggaccccacgctcagctccgactgggacggcgagcgcaccgcgccgcagtgtctactccggatcaagcggtgagccggggtttttcctcccccagccccgagctccggggctcgaccttccccgccccccaccctctcccactacaactcaccccccacccactgcgctgccctcgcggcggcccacctccacggcccaaatcttgccagctccgggcgtcgggatccaactcccttctccccccaccctcagacccgcaagcaccaacccccgcctcgtgtgcccagatccgaccccgcccctcgacaacctcccgtgagccctccgtctccattccggccaccctcccccacacctcccacctccgggtggaaacccgaccctttagcgcttcagtaacgccccctcccgccttcggcgccgcccctatttccccttccccaccccaaccttgctagatgctgcccgcaggccccacccatcggtcccctctcttctcctctggagccccgttcctaacacagacgaactcagcttcctttgccatgcctctgactcgagccaaatctcgagagctcaagcttactagtgtggataaccgtattaccgccatgcat

SEQ ID NO: 43313 - DNA, 5379 bp, ARTIFICIAL SEQUENCE
  vector containing human replication origin
tagttattaatagtaatcaattacggggtcattagttcatagcccatatatggagttccgcgttacataacttacggtaaatggcccgcctggctgaccgcccaacgacccccgcccattgacgtcaataatgacgtatgttcccatagtaacgccaatagggactttccattgacgtcaatgggtggagtatttacggtaaactgcccacttggcagtacatcaagtgtatcatatgccaagtacgccccctattgacgtcaatgacggtaaatggcccgcctggcattatgcccagtacatgaccttatgggactttcctacttggcagtacatctacgtattagtcatcgctattaccatggtgatgcggttttggcagtacatcaatgggcgtggatagcggtttgactcacggggatttccaagtctccaccccattgacgtcaatgggagtttgttttggcaccaaaatcaacgggactttccaaaatgtcgtaacaactccgccccattgacgcaaatgggcggtaggcgtgtacggtgggaggtctatataagcagagctggtttagtgaaccgtcagatccgctagagcatgaccgagtacaagcccacggtgcgcctcgccacccgcgacgacgtcccccgggccgtacgcaccctcgccgccgcgttcgccgactaccccgccacgcgccacaccgtcgacccggaccgccacatcgagcgggtcaccgagctgcaagaactcttcctcacgcgcgtcgggctcgacatcggcaaggtgtgggtcgcggacgacggcgccgcggtggcggtctggaccacgccggagagcgtcgaagcgggggcggtgttcgccgagatcggcccgcgcatggccgagttgagcggttcccggctggccgcgcagcaacagatggaaggcctcctggcgccgcaccggcccaaggagcccgcgtggttcctggccaccgtcggcgtctcgcccgaccaccagggcaagggtctgggcagcgccgtcgtgctccccggagtggaggcggccgagcgcgccggggtgcccgccttcctggagacctccgcgccccgcaacctccccttctacgagcggctcggcttcaccgtcaccgccgacgtcgaggtgcccgaaggaccgcgcacctggtgcatgacccgcaagcccggtgcctagctgattggtctaaaatgagatacatcaacgctcctccatgttttttgttttctttttaaatgaaaaactttattttttaagaggagtttcaggttcatagcaaaattgagaggaaggtacattcaagctgaggaagttttcctctattcctagtttactgagagattgcatcatgaatgggtgttaaattttgtcaaatgctttttctgtgtctatcaatatgaccatgtgattttcttctttaacctgttgatgggacaaattacgttaattgattttcaaacgttgaaccacccttacatatctggaataaattctacttggttgtggtgtatattttttgatacattcttggattctttttgctaatattttgttgaaaatgtttgtatctttgttcatgagagatattggtctgttgttttcttttcttgtaatgtcattttctagttccggtattaaggtaatgctggcctagttgaatgatttaggaagtattccctctgcttctgtcttctgaaagagattgtagaaagttgatacaatttttttttctttaaatatttgatagaattctgcagtgaattctgcagtcgacggtaccgcgggcccgggatccaccggatctagataactgatcataatcagccataccacatttgtagaggttttacttgctttaaaaaacctcccacacctccccctgaacctgaaacataaaatgaatgcaattgttgttgttaacttgtttattgcagcttataatggttacaaataaagcaatagcatcacaaatttcacaaataaagcatttttttcactgcattctagttgtggtttgtccaaactcatcaatgtatcttaacgcgtaaattgtaagcgttaatattttgttaaaattcgcgttaaatttttgttaaatcagctcattttttaaccaataggccgaaatcggcgcggaacccctatttgtttatttttctaaatacattcaaatatgtatccgctcatgagacaataaccctgataaatgcttcaataatattgaaaaaggaagagtcaggatgaggatcgtttcgcatgattgaacaagatggattgcacgcaggttctccggccgcttgggtggagaggctattcggctatgactgggcacaacagacaatcggctgctctgatgccgccgtgttccggctgtcagcgcaggggcgcccggttctttttgtcaagaccgacctgtccggtgccctgaatgaactgcaagacgaggcagcgcggctatcgtggctggccacgacgggcgttccttgcgcagctgtgctcgacgttgtcactgaagcgggaagggactggctgctattgggcgaagtgccggggcaggatctcctgtcatctcaccttgctcctgccgagaaagtatccatcatggctgatgcaatgcggcggctgcatacgcttgatccggctacctgcccattcgaccaccaagcgaaacatcgcatcgagcgagcacgtactcggatggaagccggtcttgtcgatcaggatgatctggacgaagagcatcaggggctcgcgccagccgaactgttcgccaggctcaaggcgagcatgcccgacggcgaggatctcgtcgtgacccatggcgatgcctgcttgccgaatatcatggtggaaaatggccgcttttctggattcatcgactgtggccggctgggtgtggcggaccgctatcaggacatagcgttggctacccgtgatattgctgaagagcttggcggcgaatgggctgaccgcttcctcgtgctttacggtatcgccgctcccgattcgcagcgcatcgccttctatcgccttcttgacgagttcttctgagcgggactctggggttcgaaatgaccgaccaagcgacgcccaacctgccatcacgagatttcgattccaccgccgccttctatgaaaggttgggcttcggaatcgttttccgggacgccggctggatgatcctccagcgcggggatctcatgctggagttcttcgcccaccctagggggaggctaactgaaacacggaaggagacaataccggaaggaacccgcgctatgacggcaataaaaagacagaataaaacgcacggtgttgggtcgtttgttcataaacgcggggttcggtcccagggctggcactctgtcgataccccaccgagaccccattggggccaatacgcccgcgtttcttccttttccccaccccaccccccaagttcgggtgaaggcccagggctcgcagccaacgtcggggcggcaggccctgccatagcctcaggttactcatatatactttagattgatttaaaacttcatttttaatttaaaaggatctaggtgaagatcctttttgataatctcatgaccaaaatcccttaacgtgagttttcgttccactgagcgtcagaccccgtagaaaagatcaaaggatcttcttgagatcctttttttctgcgcgtaatctgctgcttgcaaacaaaaaaaccaccgctaccagcggtggtttgtttgccggatcaagagctaccaactctttttccgaaggtaactggcttcagcagagcgcagataccaaatactgtccttctagtgtagccgtagttaggccaccacttcaagaactctgtagcaccgcctacatacctcgctctgctaatcctgttaccagtggctgctgccagtggcgataagtcgtgtcttaccgggttggactcaagacgatagttaccggataaggcgcagcggtcgggctgaacggggggttcgtgcacacagcccagcttggagcgaacgacctacaccgaactgagatacctacagcgtgagctatgagaaagcgccacgcttcccgaagggagaaaggcggacaggtatccggtaagcggcagggtcggaacaggagagcgcacgagggagcttccagggggaaacgcctggtatctttatagtcctgtcgggtttcgccacctctgacttgagcgtcgatttttgtgatgctcgtcaggggggcggagcctatggaaaaacgccagcaacgcggcctttttacggttcctggccttttgctggccttttgctcacatgttctttcctgcgttatcccctgattctgctagcttaagcggccgcgatgcaggtatctggtgaggattatcccctcacgtgcccccggctccagctagagcttttgttccaccttccaagccccgccccttagcactccacatctcaaccctctagcaaggcctattccaagttccaccgcctcttgcgtcacccttactgtcacctcccctgtaacctccgccccacatggcttcaccccaaagccccgcgctctgagcgcggccggctccaagctccaccgcctcagtgagcaccctccagatcccgccctctaacccccgcctacagccccacccctggaacccccgcgtcctcagcgctccgccctctacttcaagttccaccaccactcaccgcatcaccctccggacacacctctctaaaccccgcccacaaccccgcccctcaaagccccacctcctcaaagccccacccccggctccaagctcctccgcctcacagagcgcatcctcatgtccgtcccctctaaaccccgcccacattcccaactcctgaggaagccccgcctcctcccgaagctccgccccttagtgcagtaactcacaggaccacctcctcagcaaacttttccccaagccccgcctttcaatgccctgcctcaagccccgccctcttgactcaccccacaaagccccacccctcagggagctggacaggacgcccaccccctgccagaggcccagggctgcgagcctggcctgtgagatgccctaatctgtctgggtccgagttcccagggagaggcgggaggccactgcaggggcttgggttccagccccatgagctgctggctagtgcaactctgcacagacagatccctcggggatgcactgtcggtaataccggcccctccaaagtgtccccagccggtccatcctttcccaccacagtggccttcaagaaacatcccctgttcttgccaccccaaagccacgatctcgagagctcaagcttactagtgtggataaccgtattaccgccatgcat

SEQ ID NO: 43314 - DNA, 5394 bp, ARTIFICIAL SEQUENCE
  vector containing human replication origin
tagttattaatagtaatcaattacggggtcattagttcatagcccatatatggagttccgcgttacataacttacggtaaatggcccgcctggctgaccgcccaacgacccccgcccattgacgtcaataatgacgtatgttcccatagtaacgccaatagggactttccattgacgtcaatgggtggagtatttacggtaaactgcccacttggcagtacatcaagtgtatcatatgccaagtacgccccctattgacgtcaatgacggtaaatggcccgcctggcattatgcccagtacatgaccttatgggactttcctacttggcagtacatctacgtattagtcatcgctattaccatggtgatgcggttttggcagtacatcaatgggcgtggatagcggtttgactcacggggatttccaagtctccaccccattgacgtcaatgggagtttgttttggcaccaaaatcaacgggactttccaaaatgtcgtaacaactccgccccattgacgcaaatgggcggtaggcgtgtacggtgggaggtctatataagcagagctggtttagtgaaccgtcagatccgctagagcatgaccgagtacaagcccacggtgcgcctcgccacccgcgacgacgtcccccgggccgtacgcaccctcgccgccgcgttcgccgactaccccgccacgcgccacaccgtcgacccggaccgccacatcgagcgggtcaccgagctgcaagaactcttcctcacgcgcgtcgggctcgacatcggcaaggtgtgggtcgcggacgacggcgccgcggtggcggtctggaccacgccggagagcgtcgaagcgggggcggtgttcgccgagatcggcccgcgcatggccgagttgagcggttcccggctggccgcgcagcaacagatggaaggcctcctggcgccgcaccggcccaaggagcccgcgtggttcctggccaccgtcggcgtctcgcccgaccaccagggcaagggtctgggcagcgccgtcgtgctccccggagtggaggcggccgagcgcgccggggtgcccgccttcctggagacctccgcgccccgcaacctccccttctacgagcggctcggcttcaccgtcaccgccgacgtcgaggtgcccgaaggaccgcgcacctggtgcatgacccgcaagcccggtgcctagctgattggtctaaaatgagatacatcaacgctcctccatgttttttgttttctttttaaatgaaaaactttattttttaagaggagtttcaggttcatagcaaaattgagaggaaggtacattcaagctgaggaagttttcctctattcctagtttactgagagattgcatcatgaatgggtgttaaattttgtcaaatgctttttctgtgtctatcaatatgaccatgtgattttcttctttaacctgttgatgggacaaattacgttaattgattttcaaacgttgaaccacccttacatatctggaataaattctacttggttgtggtgtatattttttgatacattcttggattctttttgctaatattttgttgaaaatgtttgtatctttgttcatgagagatattggtctgttgttttcttttcttgtaatgtcattttctagttccggtattaaggtaatgctggcctagttgaatgatttaggaagtattccctctgcttctgtcttctgaaagagattgtagaaagttgatacaatttttttttctttaaatatttgatagaattctgcagtgaattctgcagtcgacggtaccgcgggcccgggatccaccggatctagataactgatcataatcagccataccacatttgtagaggttttacttgctttaaaaaacctcccacacctccccctgaacctgaaacataaaatgaatgcaattgttgttgttaacttgtttattgcagcttataatggttacaaataaagcaatagcatcacaaatttcacaaataaagcatttttttcactgcattctagttgtggtttgtccaaactcatcaatgtatcttaacgcgtaaattgtaagcgttaatattttgttaaaattcgcgttaaatttttgttaaatcagctcattttttaaccaataggccgaaatcggcgcggaacccctatttgtttatttttctaaatacattcaaatatgtatccgctcatgagacaataaccctgataaatgcttcaataatattgaaaaaggaagagtcaggatgaggatcgtttcgcatgattgaacaagatggattgcacgcaggttctccggccgcttgggtggagaggctattcggctatgactgggcacaacagacaatcggctgctctgatgccgccgtgttccggctgtcagcgcaggggcgcccggttctttttgtcaagaccgacctgtccggtgccctgaatgaactgcaagacgaggcagcgcggctatcgtggctggccacgacgggcgttccttgcgcagctgtgctcgacgttgtcactgaagcgggaagggactggctgctattgggcgaagtgccggggcaggatctcctgtcatctcaccttgctcctgccgagaaagtatccatcatggctgatgcaatgcggcggctgcatacgcttgatccggctacctgcccattcgaccaccaagcgaaacatcgcatcgagcgagcacgtactcggatggaagccggtcttgtcgatcaggatgatctggacgaagagcatcaggggctcgcgccagccgaactgttcgccaggctcaaggcgagcatgcccgacggcgaggatctcgtcgtgacccatggcgatgcctgcttgccgaatatcatggtggaaaatggccgcttttctggattcatcgactgtggccggctgggtgtggcggaccgctatcaggacatagcgttggctacccgtgatattgctgaagagcttggcggcgaatgggctgaccgcttcctcgtgctttacggtatcgccgctcccgattcgcagcgcatcgccttctatcgccttcttgacgagttcttctgagcgggactctggggttcgaaatgaccgaccaagcgacgcccaacctgccatcacgagatttcgattccaccgccgccttctatgaaaggttgggcttcggaatcgttttccgggacgccggctggatgatcctccagcgcggggatctcatgctggagttcttcgcccaccctagggggaggctaactgaaacacggaaggagacaataccggaaggaacccgcgctatgacggcaataaaaagacagaataaaacgcacggtgttgggtcgtttgttcataaacgcggggttcggtcccagggctggcactctgtcgataccccaccgagaccccattggggccaatacgcccgcgtttcttccttttccccaccccaccccccaagttcgggtgaaggcccagggctcgcagccaacgtcggggcggcaggccctgccatagcctcaggttactcatatatactttagattgatttaaaacttcatttttaatttaaaaggatctaggtgaagatcctttttgataatctcatgaccaaaatcccttaacgtgagttttcgttccactgagcgtcagaccccgtagaaaagatcaaaggatcttcttgagatcctttttttctgcgcgtaatctgctgcttgcaaacaaaaaaaccaccgctaccagcggtggtttgtttgccggatcaagagctaccaactctttttccgaaggtaactggcttcagcagagcgcagataccaaatactgtccttctagtgtagccgtagttaggccaccacttcaagaactctgtagcaccgcctacatacctcgctctgctaatcctgttaccagtggctgctgccagtggcgataagtcgtgtcttaccgggttggactcaagacgatagttaccggataaggcgcagcggtcgggctgaacggggggttcgtgcacacagcccagcttggagcgaacgacctacaccgaactgagatacctacagcgtgagctatgagaaagcgccacgcttcccgaagggagaaaggcggacaggtatccggtaagcggcagggtcggaacaggagagcgcacgagggagcttccagggggaaacgcctggtatctttatagtcctgtcgggtttcgccacctctgacttgagcgtcgatttttgtgatgctcgtcaggggggcggagcctatggaaaaacgccagcaacgcggcctttttacggttcctggccttttgctggccttttgctcacatgttctttcctgcgttatcccctgattctgctagcttaagcggccgcgataggtgtcctgcgctgaggccgggctgcaagaggggtggggagtgtgagcactgcctggaacacgaggccgagtccaacagggaagactttcatggggctacacgagcagctggctgtggaaacaggcctgtgcacaagacgcatggcaggtgtgggggagggaggtcccaggggctggggcccagctgccggggccaggccttgcacgtgggcacggtgtcctgaggtcaagggatgcagagttgggtccagggaggagggaggggctgagaagtgggcaggggctccctggcggtgatggggacaggtaaaactgggggggtggagggggcaggcggggggggatgggcagtaggcctgcgacctgagaggttgtggtggggaaccggctgctgagggccctggtcagggcagcgacttggtttctagggttggagagaggaggaactagctggaggaggacaggactcagtacagagctggcatcttggtgtaagggtgcgtgaggtgggagggcctggggaggtgggtgtgtgtggggtgggctggtgaggcgtgggcgaggtctcagtgctgaggccttggttgagctgtatccttttggcagatttatcacacgtcctgatgtcaagcaaagcaagatggctgagttcctggactggagcctgtgcaatctggcccgttcctccttccagaccatgcagggggtcatcaccatggatgggacgctgcaggccctggtaagtgctgcccgcaggggctgtggagatcgcagggaaatggcgccttacatggggaccacggaatgatgttacctgtgattccatcttgacgtaattggaaccccgtgggattgatttaaccgggccagggtcttgggcagtttccttttccctctgctttgggtcctgcctcaggcagggctggtttctgcgctggtgctggtggatgggcttggagccccaatctcgagagctcaagcttactagtgtggataaccgtattaccgccatgcat

SEQ ID NO: 43315 - DNA, 5229 bp, ARTIFICIAL SEQUENCE
  vector containing human replication origin
tagttattaatagtaatcaattacggggtcattagttcatagcccatatatggagttccgcgttacataacttacggtaaatggcccgcctggctgaccgcccaacgacccccgcccattgacgtcaataatgacgtatgttcccatagtaacgccaatagggactttccattgacgtcaatgggtggagtatttacggtaaactgcccacttggcagtacatcaagtgtatcatatgccaagtacgccccctattgacgtcaatgacggtaaatggcccgcctggcattatgcccagtacatgaccttatgggactttcctacttggcagtacatctacgtattagtcatcgctattaccatggtgatgcggttttggcagtacatcaatgggcgtggatagcggtttgactcacggggatttccaagtctccaccccattgacgtcaatgggagtttgttttggcaccaaaatcaacgggactttccaaaatgtcgtaacaactccgccccattgacgcaaatgggcggtaggcgtgtacggtgggaggtctatataagcagagctggtttagtgaaccgtcagatccgctagagcatgaccgagtacaagcccacggtgcgcctcgccacccgcgacgacgtcccccgggccgtacgcaccctcgccgccgcgttcgccgactaccccgccacgcgccacaccgtcgacccggaccgccacatcgagcgggtcaccgagctgcaagaactcttcctcacgcgcgtcgggctcgacatcggcaaggtgtgggtcgcggacgacggcgccgcggtggcggtctggaccacgccggagagcgtcgaagcgggggcggtgttcgccgagatcggcccgcgcatggccgagttgagcggttcccggctggccgcgcagcaacagatggaaggcctcctggcgccgcaccggcccaaggagcccgcgtggttcctggccaccgtcggcgtctcgcccgaccaccagggcaagggtctgggcagcgccgtcgtgctccccggagtggaggcggccgagcgcgccggggtgcccgccttcctggagacctccgcgccccgcaacctccccttctacgagcggctcggcttcaccgtcaccgccgacgtcgaggtgcccgaaggaccgcgcacctggtgcatgacccgcaagcccggtgcctagctgattggtctaaaatgagatacatcaacgctcctccatgttttttgttttctttttaaatgaaaaactttattttttaagaggagtttcaggttcatagcaaaattgagaggaaggtacattcaagctgaggaagttttcctctattcctagtttactgagagattgcatcatgaatgggtgttaaattttgtcaaatgctttttctgtgtctatcaatatgaccatgtgattttcttctttaacctgttgatgggacaaattacgttaattgattttcaaacgttgaaccacccttacatatctggaataaattctacttggttgtggtgtatattttttgatacattcttggattctttttgctaatattttgttgaaaatgtttgtatctttgttcatgagagatattggtctgttgttttcttttcttgtaatgtcattttctagttccggtattaaggtaatgctggcctagttgaatgatttaggaagtattccctctgcttctgtcttctgaaagagattgtagaaagttgatacaatttttttttctttaaatatttgatagaattctgcagtgaattctgcagtcgacggtaccgcgggcccgggatccaccggatctagataactgatcataatcagccataccacatttgtagaggttttacttgctttaaaaaacctcccacacctccccctgaacctgaaacataaaatgaatgcaattgttgttgttaacttgtttattgcagcttataatggttacaaataaagcaatagcatcacaaatttcacaaataaagcatttttttcactgcattctagttgtggtttgtccaaactcatcaatgtatcttaacgcgtaaattgtaagcgttaatattttgttaaaattcgcgttaaatttttgttaaatcagctcattttttaaccaataggccgaaatcggcgcggaacccctatttgtttatttttctaaatacattcaaatatgtatccgctcatgagacaataaccctgataaatgcttcaataatattgaaaaaggaagagtcaggatgaggatcgtttcgcatgattgaacaagatggattgcacgcaggttctccggccgcttgggtggagaggctattcggctatgactgggcacaacagacaatcggctgctctgatgccgccgtgttccggctgtcagcgcaggggcgcccggttctttttgtcaagaccgacctgtccggtgccctgaatgaactgcaagacgaggcagcgcggctatcgtggctggccacgacgggcgttccttgcgcagctgtgctcgacgttgtcactgaagcgggaagggactggctgctattgggcgaagtgccggggcaggatctcctgtcatctcaccttgctcctgccgagaaagtatccatcatggctgatgcaatgcggcggctgcatacgcttgatccggctacctgcccattcgaccaccaagcgaaacatcgcatcgagcgagcacgtactcggatggaagccggtcttgtcgatcaggatgatctggacgaagagcatcaggggctcgcgccagccgaactgttcgccaggctcaaggcgagcatgcccgacggcgaggatctcgtcgtgacccatggcgatgcctgcttgccgaatatcatggtggaaaatggccgcttttctggattcatcgactgtggccggctgggtgtggcggaccgctatcaggacatagcgttggctacccgtgatattgctgaagagcttggcggcgaatgggctgaccgcttcctcgtgctttacggtatcgccgctcccgattcgcagcgcatcgccttctatcgccttcttgacgagttcttctgagcgggactctggggttcgaaatgaccgaccaagcgacgcccaacctgccatcacgagatttcgattccaccgccgccttctatgaaaggttgggcttcggaatcgttttccgggacgccggctggatgatcctccagcgcggggatctcatgctggagttcttcgcccaccctagggggaggctaactgaaacacggaaggagacaataccggaaggaacccgcgctatgacggcaataaaaagacagaataaaacgcacggtgttgggtcgtttgttcataaacgcggggttcggtcccagggctggcactctgtcgataccccaccgagaccccattggggccaatacgcccgcgtttcttccttttccccaccccaccccccaagttcgggtgaaggcccagggctcgcagccaacgtcggggcggcaggccctgccatagcctcaggttactcatatatactttagattgatttaaaacttcatttttaatttaaaaggatctaggtgaagatcctttttgataatctcatgaccaaaatcccttaacgtgagttttcgttccactgagcgtcagaccccgtagaaaagatcaaaggatcttcttgagatcctttttttctgcgcgtaatctgctgcttgcaaacaaaaaaaccaccgctaccagcggtggtttgtttgccggatcaagagctaccaactctttttccgaaggtaactggcttcagcagagcgcagataccaaatactgtccttctagtgtagccgtagttaggccaccacttcaagaactctgtagcaccgcctacatacctcgctctgctaatcctgttaccagtggctgctgccagtggcgataagtcgtgtcttaccgggttggactcaagacgatagttaccggataaggcgcagcggtcgggctgaacggggggttcgtgcacacagcccagcttggagcgaacgacctacaccgaactgagatacctacagcgtgagctatgagaaagcgccacgcttcccgaagggagaaaggcggacaggtatccggtaagcggcagggtcggaacaggagagcgcacgagggagcttccagggggaaacgcctggtatctttatagtcctgtcgggtttcgccacctctgacttgagcgtcgatttttgtgatgctcgtcaggggggcggagcctatggaaaaacgccagcaacgcggcctttttacggttcctggccttttgctggccttttgctcacatgttctttcctgcgttatcccctgattctgctagcttaagcggccgcgatgcacatgataccagcatttccaatagtgaccctaatagacaaagcattttggagttctgacatcgacagggagcagatcccagtcatgaagaaacaacttgagtgtgtgacggcaagaccatgaaagccttcctttgcaagcatcgcctgggctcttctgctcacccaaggcagaactgaggaggggtggggtgggcattcctcaccacaggatcctttttcttgagcaagcccatcttaagatttgtagggagagctggcttagagagacttccaaagctacacttctaactgtcctggcctttggccccatctgcctgtcaatttcagtctgagtccacaattcccatgtttacggctctggggatatctagaacctcggctttggagcgctcagggatgctgctaggccagttccctattgacctttcagggactctgaaatcaactttcctcacacactctgaattgtttgcgtttgttttcatcctgccagagccacccgcccaggccacccatctcttccctcctccctgccccctcccctccctccggcctctctggctctacccccccctcccccgccctcctctttgttgtctcctacctgctggccaggctctgcctgcagtgctgcctgaagggcatcaggtggtagttcatggcgtccagcagcagcttctggcagaccgggtcggttcgcatgaaatccactgactggacccgctccaccagctccggggccgggatgagggcgaagcggaggcgcttcatgaggtcaggcgcatactgcatgcgggatctcgagagctcaagcttactagtgtggataaccgtattaccgccatgcat

SEQ ID NO: 43316 - DNA, 5499 bp, ARTIFICIAL SEQUENCE
  vector containing human replication origin
tagttattaatagtaatcaattacggggtcattagttcatagcccatatatggagttccgcgttacataacttacggtaaatggcccgcctggctgaccgcccaacgacccccgcccattgacgtcaataatgacgtatgttcccatagtaacgccaatagggactttccattgacgtcaatgggtggagtatttacggtaaactgcccacttggcagtacatcaagtgtatcatatgccaagtacgccccctattgacgtcaatgacggtaaatggcccgcctggcattatgcccagtacatgaccttatgggactttcctacttggcagtacatctacgtattagtcatcgctattaccatggtgatgcggttttggcagtacatcaatgggcgtggatagcggtttgactcacggggatttccaagtctccaccccattgacgtcaatgggagtttgttttggcaccaaaatcaacgggactttccaaaatgtcgtaacaactccgccccattgacgcaaatgggcggtaggcgtgtacggtgggaggtctatataagcagagctggtttagtgaaccgtcagatccgctagagcatgaccgagtacaagcccacggtgcgcctcgccacccgcgacgacgtcccccgggccgtacgcaccctcgccgccgcgttcgccgactaccccgccacgcgccacaccgtcgacccggaccgccacatcgagcgggtcaccgagctgcaagaactcttcctcacgcgcgtcgggctcgacatcggcaaggtgtgggtcgcggacgacggcgccgcggtggcggtctggaccacgccggagagcgtcgaagcgggggcggtgttcgccgagatcggcccgcgcatggccgagttgagcggttcccggctggccgcgcagcaacagatggaaggcctcctggcgccgcaccggcccaaggagcccgcgtggttcctggccaccgtcggcgtctcgcccgaccaccagggcaagggtctgggcagcgccgtcgtgctccccggagtggaggcggccgagcgcgccggggtgcccgccttcctggagacctccgcgccccgcaacctccccttctacgagcggctcggcttcaccgtcaccgccgacgtcgaggtgcccgaaggaccgcgcacctggtgcatgacccgcaagcccggtgcctagctgattggtctaaaatgagatacatcaacgctcctccatgttttttgttttctttttaaatgaaaaactttattttttaagaggagtttcaggttcatagcaaaattgagaggaaggtacattcaagctgaggaagttttcctctattcctagtttactgagagattgcatcatgaatgggtgttaaattttgtcaaatgctttttctgtgtctatcaatatgaccatgtgattttcttctttaacctgttgatgggacaaattacgttaattgattttcaaacgttgaaccacccttacatatctggaataaattctacttggttgtggtgtatattttttgatacattcttggattctttttgctaatattttgttgaaaatgtttgtatctttgttcatgagagatattggtctgttgttttcttttcttgtaatgtcattttctagttccggtattaaggtaatgctggcctagttgaatgatttaggaagtattccctctgcttctgtcttctgaaagagattgtagaaagttgatacaatttttttttctttaaatatttgatagaattctgcagtgaattctgcagtcgacggtaccgcgggcccgggatccaccggatctagataactgatcataatcagccataccacatttgtagaggttttacttgctttaaaaaacctcccacacctccccctgaacctgaaacataaaatgaatgcaattgttgttgttaacttgtttattgcagcttataatggttacaaataaagcaatagcatcacaaatttcacaaataaagcatttttttcactgcattctagttgtggtttgtccaaactcatcaatgtatcttaacgcgtaaattgtaagcgttaatattttgttaaaattcgcgttaaatttttgttaaatcagctcattttttaaccaataggccgaaatcggcgcggaacccctatttgtttatttttctaaatacattcaaatatgtatccgctcatgagacaataaccctgataaatgcttcaataatattgaaaaaggaagagtcaggatgaggatcgtttcgcatgattgaacaagatggattgcacgcaggttctccggccgcttgggtggagaggctattcggctatgactgggcacaacagacaatcggctgctctgatgccgccgtgttccggctgtcagcgcaggggcgcccggttctttttgtcaagaccgacctgtccggtgccctgaatgaactgcaagacgaggcagcgcggctatcgtggctggccacgacgggcgttccttgcgcagctgtgctcgacgttgtcactgaagcgggaagggactggctgctattgggcgaagtgccggggcaggatctcctgtcatctcaccttgctcctgccgagaaagtatccatcatggctgatgcaatgcggcggctgcatacgcttgatccggctacctgcccattcgaccaccaagcgaaacatcgcatcgagcgagcacgtactcggatggaagccggtcttgtcgatcaggatgatctggacgaagagcatcaggggctcgcgccagccgaactgttcgccaggctcaaggcgagcatgcccgacggcgaggatctcgtcgtgacccatggcgatgcctgcttgccgaatatcatggtggaaaatggccgcttttctggattcatcgactgtggccggctgggtgtggcggaccgctatcaggacatagcgttggctacccgtgatattgctgaagagcttggcggcgaatgggctgaccgcttcctcgtgctttacggtatcgccgctcccgattcgcagcgcatcgccttctatcgccttcttgacgagttcttctgagcgggactctggggttcgaaatgaccgaccaagcgacgcccaacctgccatcacgagatttcgattccaccgccgccttctatgaaaggttgggcttcggaatcgttttccgggacgccggctggatgatcctccagcgcggggatctcatgctggagttcttcgcccaccctagggggaggctaactgaaacacggaaggagacaataccggaaggaacccgcgctatgacggcaataaaaagacagaataaaacgcacggtgttgggtcgtttgttcataaacgcggggttcggtcccagggctggcactctgtcgataccccaccgagaccccattggggccaatacgcccgcgtttcttccttttccccaccccaccccccaagttcgggtgaaggcccagggctcgcagccaacgtcggggcggcaggccctgccatagcctcaggttactcatatatactttagattgatttaaaacttcatttttaatttaaaaggatctaggtgaagatcctttttgataatctcatgaccaaaatcccttaacgtgagttttcgttccactgagcgtcagaccccgtagaaaagatcaaaggatcttcttgagatcctttttttctgcgcgtaatctgctgcttgcaaacaaaaaaaccaccgctaccagcggtggtttgtttgccggatcaagagctaccaactctttttccgaaggtaactggcttcagcagagcgcagataccaaatactgtccttctagtgtagccgtagttaggccaccacttcaagaactctgtagcaccgcctacatacctcgctctgctaatcctgttaccagtggctgctgccagtggcgataagtcgtgtcttaccgggttggactcaagacgatagttaccggataaggcgcagcggtcgggctgaacggggggttcgtgcacacagcccagcttggagcgaacgacctacaccgaactgagatacctacagcgtgagctatgagaaagcgccacgcttcccgaagggagaaaggcggacaggtatccggtaagcggcagggtcggaacaggagagcgcacgagggagcttccagggggaaacgcctggtatctttatagtcctgtcgggtttcgccacctctgacttgagcgtcgatttttgtgatgctcgtcaggggggcggagcctatggaaaaacgccagcaacgcggcctttttacggttcctggccttttgctggccttttgctcacatgttctttcctgcgttatcccctgattctgctagcttaagcggccgcgatcgcagtccgccaacggcgcgcagtccaacgttcgccgaggccacgccccggctcgtgtcagctcctgagtaggcggaaagagggagggggcgggacttgggcgcagccaatcagctgtggaggagcgaaaaggcgggaaaaagcggaaccaaaagaaggctgaggtggcgctagggaccaggaggggtgggggtggcgaaaggaagggcgggccctcaggtgacgcagattggccctccagagaaggggcggccccttctcaggtgccgtcacccccaaacctcagcactgccattccaggtccttaaaggggagaccgcgattctaagaaggtagcccagtgccggggcgtggcctcattctgaggttccccacaaatccgaggtcccgactcccagcttgaggaggtgcacttccgtgaaaatggagctgaattcgaaagggaggcccttattctgggaaatggccccaagtgacaaggacagcctgaaatatgccctgagatacctgggttctccacgaagggtgctgtcacccccaaacctgaaagggattattcggtttcagacctcccaggggctctgatctcaatggccgcaccccctagtccccagaaagtcccacctgtgtcctctcacagaaggacccagtccctctgcaggcccttcagctcctgggtcacaagacgtggtccccaaatatcccagccctcccctgcactccacctctgggatccctgacagccctctcgcccaacaaccccctcagcccacattcctgacttctggaacctgaagcagccccttcacttatgtcccccactcctgggacccccagaatcaccctcaccccaggccctcacctctctggaatcctccatagacccccttaacccacacctcaacccaggggacccttagcgactctctcatcctgcacctccacctctgtgacccctggcagccctccccacacgacaccttgcctgggacccctagtatccccatcctatgcccccctctcctgggacccccagaaagctccctcaccacacacaaccccattcctggatctcgagagctcaagcttactagtgtggataaccgtattaccgccatgcat

SEQ ID NO: 43317 - DNA, 5369 bp, ARTIFICIAL SEQUENCE
  vector containing human replication origin
tagttattaatagtaatcaattacggggtcattagttcatagcccatatatggagttccgcgttacataacttacggtaaatggcccgcctggctgaccgcccaacgacccccgcccattgacgtcaataatgacgtatgttcccatagtaacgccaatagggactttccattgacgtcaatgggtggagtatttacggtaaactgcccacttggcagtacatcaagtgtatcatatgccaagtacgccccctattgacgtcaatgacggtaaatggcccgcctggcattatgcccagtacatgaccttatgggactttcctacttggcagtacatctacgtattagtcatcgctattaccatggtgatgcggttttggcagtacatcaatgggcgtggatagcggtttgactcacggggatttccaagtctccaccccattgacgtcaatgggagtttgttttggcaccaaaatcaacgggactttccaaaatgtcgtaacaactccgccccattgacgcaaatgggcggtaggcgtgtacggtgggaggtctatataagcagagctggtttagtgaaccgtcagatccgctagagcatgaccgagtacaagcccacggtgcgcctcgccacccgcgacgacgtcccccgggccgtacgcaccctcgccgccgcgttcgccgactaccccgccacgcgccacaccgtcgacccggaccgccacatcgagcgggtcaccgagctgcaagaactcttcctcacgcgcgtcgggctcgacatcggcaaggtgtgggtcgcggacgacggcgccgcggtggcggtctggaccacgccggagagcgtcgaagcgggggcggtgttcgccgagatcggcccgcgcatggccgagttgagcggttcccggctggccgcgcagcaacagatggaaggcctcctggcgccgcaccggcccaaggagcccgcgtggttcctggccaccgtcggcgtctcgcccgaccaccagggcaagggtctgggcagcgccgtcgtgctccccggagtggaggcggccgagcgcgccggggtgcccgccttcctggagacctccgcgccccgcaacctccccttctacgagcggctcggcttcaccgtcaccgccgacgtcgaggtgcccgaaggaccgcgcacctggtgcatgacccgcaagcccggtgcctagctgattggtctaaaatgagatacatcaacgctcctccatgttttttgttttctttttaaatgaaaaactttattttttaagaggagtttcaggttcatagcaaaattgagaggaaggtacattcaagctgaggaagttttcctctattcctagtttactgagagattgcatcatgaatgggtgttaaattttgtcaaatgctttttctgtgtctatcaatatgaccatgtgattttcttctttaacctgttgatgggacaaattacgttaattgattttcaaacgttgaaccacccttacatatctggaataaattctacttggttgtggtgtatattttttgatacattcttggattctttttgctaatattttgttgaaaatgtttgtatctttgttcatgagagatattggtctgttgttttcttttcttgtaatgtcattttctagttccggtattaaggtaatgctggcctagttgaatgatttaggaagtattccctctgcttctgtcttctgaaagagattgtagaaagttgatacaatttttttttctttaaatatttgatagaattctgcagtgaattctgcagtcgacggtaccgcgggcccgggatccaccggatctagataactgatcataatcagccataccacatttgtagaggttttacttgctttaaaaaacctcccacacctccccctgaacctgaaacataaaatgaatgcaattgttgttgttaacttgtttattgcagcttataatggttacaaataaagcaatagcatcacaaatttcacaaataaagcatttttttcactgcattctagttgtggtttgtccaaactcatcaatgtatcttaacgcgtaaattgtaagcgttaatattttgttaaaattcgcgttaaatttttgttaaatcagctcattttttaaccaataggccgaaatcggcgcggaacccctatttgtttatttttctaaatacattcaaatatgtatccgctcatgagacaataaccctgataaatgcttcaataatattgaaaaaggaagagtcaggatgaggatcgtttcgcatgattgaacaagatggattgcacgcaggttctccggccgcttgggtggagaggctattcggctatgactgggcacaacagacaatcggctgctctgatgccgccgtgttccggctgtcagcgcaggggcgcccggttctttttgtcaagaccgacctgtccggtgccctgaatgaactgcaagacgaggcagcgcggctatcgtggctggccacgacgggcgttccttgcgcagctgtgctcgacgttgtcactgaagcgggaagggactggctgctattgggcgaagtgccggggcaggatctcctgtcatctcaccttgctcctgccgagaaagtatccatcatggctgatgcaatgcggcggctgcatacgcttgatccggctacctgcccattcgaccaccaagcgaaacatcgcatcgagcgagcacgtactcggatggaagccggtcttgtcgatcaggatgatctggacgaagagcatcaggggctcgcgccagccgaactgttcgccaggctcaaggcgagcatgcccgacggcgaggatctcgtcgtgacccatggcgatgcctgcttgccgaatatcatggtggaaaatggccgcttttctggattcatcgactgtggccggctgggtgtggcggaccgctatcaggacatagcgttggctacccgtgatattgctgaagagcttggcggcgaatgggctgaccgcttcctcgtgctttacggtatcgccgctcccgattcgcagcgcatcgccttctatcgccttcttgacgagttcttctgagcgggactctggggttcgaaatgaccgaccaagcgacgcccaacctgccatcacgagatttcgattccaccgccgccttctatgaaaggttgggcttcggaatcgttttccgggacgccggctggatgatcctccagcgcggggatctcatgctggagttcttcgcccaccctagggggaggctaactgaaacacggaaggagacaataccggaaggaacccgcgctatgacggcaataaaaagacagaataaaacgcacggtgttgggtcgtttgttcataaacgcggggttcggtcccagggctggcactctgtcgataccccaccgagaccccattggggccaatacgcccgcgtttcttccttttccccaccccaccccccaagttcgggtgaaggcccagggctcgcagccaacgtcggggcggcaggccctgccatagcctcaggttactcatatatactttagattgatttaaaacttcatttttaatttaaaaggatctaggtgaagatcctttttgataatctcatgaccaaaatcccttaacgtgagttttcgttccactgagcgtcagaccccgtagaaaagatcaaaggatcttcttgagatcctttttttctgcgcgtaatctgctgcttgcaaacaaaaaaaccaccgctaccagcggtggtttgtttgccggatcaagagctaccaactctttttccgaaggtaactggcttcagcagagcgcagataccaaatactgtccttctagtgtagccgtagttaggccaccacttcaagaactctgtagcaccgcctacatacctcgctctgctaatcctgttaccagtggctgctgccagtggcgataagtcgtgtcttaccgggttggactcaagacgatagttaccggataaggcgcagcggtcgggctgaacggggggttcgtgcacacagcccagcttggagcgaacgacctacaccgaactgagatacctacagcgtgagctatgagaaagcgccacgcttcccgaagggagaaaggcggacaggtatccggtaagcggcagggtcggaacaggagagcgcacgagggagcttccagggggaaacgcctggtatctttatagtcctgtcgggtttcgccacctctgacttgagcgtcgatttttgtgatgctcgtcaggggggcggagcctatggaaaaacgccagcaacgcggcctttttacggttcctggccttttgctggccttttgctcacatgttctttcctgcgttatcccctgattctgctagcttaagcggccgcgatcgcaggaagacagcgccactgacactctagagaccagcgggcaccgcctggaggcgccttcaccacttggcggttccgggtccgcgccccaccgcgccacaagactcacgcccgaaccacgtgatcagggccgtggctccgccccgctcccgcgccgcgcgccgcttccggtaggggcggaaagcggaagtgtgggagggtctgcggggcgggctcaggaggtccgcgggaggatggagcagtgagcgggtctgggcggctgctggcagcgccatggagacggtacagctgaggaacccgccgcgccggtgaggggccactggctaagaggacgggcatggggtcaggggaagaaaaggcgggaactggttgaggggatacacctgtgtgggagtccccggagctaagcgacccagccgatggggcacctgctgagtgaggggggggacgtctggtgggtgagggtccggctgaggggagcatctgctaaggaggttagacttgggaccggttagagggagcactcgctgtggtgagactgtgctgaggaacgtggggacaagttagggagagtacctgctgaggccgggccactcgggggaacgctatccaagcagggactcacggaggtgggggcgaatgctgaagcagggtgagaatctgtgagggatctctttaagggggtggatcgagaactggccaagaggaaggccgggtggactttctaagggtctgaagtcccacttgaggggtgcggtggggggatctgtggaggggaaaagctttgcgcctaaggctgaaagcatgcgaggaaaggttgagggtctagcaagggaggggatggtggagggtagcatttcagaggatgctgttggtggtgtccccactgtaggatggcatcttttattactgatgttcagtgtcttcctaatggtcttcaatctcgagagctcaagcttactagtgtggataaccgtattaccgccatgcat

SEQ ID NO: 43318 - DNA, 5785 bp, ARTIFICIAL SEQUENCE
  vector containing human replication origin
tagttattaatagtaatcaattacggggtcattagttcatagcccatatatggagttccgcgttacataacttacggtaaatggcccgcctggctgaccgcccaacgacccccgcccattgacgtcaataatgacgtatgttcccatagtaacgccaatagggactttccattgacgtcaatgggtggagtatttacggtaaactgcccacttggcagtacatcaagtgtatcatatgccaagtacgccccctattgacgtcaatgacggtaaatggcccgcctggcattatgcccagtacatgaccttatgggactttcctacttggcagtacatctacgtattagtcatcgctattaccatggtgatgcggttttggcagtacatcaatgggcgtggatagcggtttgactcacggggatttccaagtctccaccccattgacgtcaatgggagtttgttttggcaccaaaatcaacgggactttccaaaatgtcgtaacaactccgccccattgacgcaaatgggcggtaggcgtgtacggtgggaggtctatataagcagagctggtttagtgaaccgtcagatccgctagagcatgaccgagtacaagcccacggtgcgcctcgccacccgcgacgacgtcccccgggccgtacgcaccctcgccgccgcgttcgccgactaccccgccacgcgccacaccgtcgacccggaccgccacatcgagcgggtcaccgagctgcaagaactcttcctcacgcgcgtcgggctcgacatcggcaaggtgtgggtcgcggacgacggcgccgcggtggcggtctggaccacgccggagagcgtcgaagcgggggcggtgttcgccgagatcggcccgcgcatggccgagttgagcggttcccggctggccgcgcagcaacagatggaaggcctcctggcgccgcaccggcccaaggagcccgcgtggttcctggccaccgtcggcgtctcgcccgaccaccagggcaagggtctgggcagcgccgtcgtgctccccggagtggaggcggccgagcgcgccggggtgcccgccttcctggagacctccgcgccccgcaacctccccttctacgagcggctcggcttcaccgtcaccgccgacgtcgaggtgcccgaaggaccgcgcacctggtgcatgacccgcaagcccggtgcctagctgattggtctaaaatgagatacatcaacgctcctccatgttttttgttttctttttaaatgaaaaactttattttttaagaggagtttcaggttcatagcaaaattgagaggaaggtacattcaagctgaggaagttttcctctattcctagtttactgagagattgcatcatgaatgggtgttaaattttgtcaaatgctttttctgtgtctatcaatatgaccatgtgattttcttctttaacctgttgatgggacaaattacgttaattgattttcaaacgttgaaccacccttacatatctggaataaattctacttggttgtggtgtatattttttgatacattcttggattctttttgctaatattttgttgaaaatgtttgtatctttgttcatgagagatattggtctgttgttttcttttcttgtaatgtcattttctagttccggtattaaggtaatgctggcctagttgaatgatttaggaagtattccctctgcttctgtcttctgaaagagattgtagaaagttgatacaatttttttttctttaaatatttgatagaattctgcagtgaattctgcagtcgacggtaccgcgggcccgggatccaccggatctagataactgatcataatcagccataccacatttgtagaggttttacttgctttaaaaaacctcccacacctccccctgaacctgaaacataaaatgaatgcaattgttgttgttaacttgtttattgcagcttataatggttacaaataaagcaatagcatcacaaatttcacaaataaagcatttttttcactgcattctagttgtggtttgtccaaactcatcaatgtatcttaacgcgtaaattgtaagcgttaatattttgttaaaattcgcgttaaatttttgttaaatcagctcattttttaaccaataggccgaaatcggcgcggaacccctatttgtttatttttctaaatacattcaaatatgtatccgctcatgagacaataaccctgataaatgcttcaataatattgaaaaaggaagagtcaggatgaggatcgtttcgcatgattgaacaagatggattgcacgcaggttctccggccgcttgggtggagaggctattcggctatgactgggcacaacagacaatcggctgctctgatgccgccgtgttccggctgtcagcgcaggggcgcccggttctttttgtcaagaccgacctgtccggtgccctgaatgaactgcaagacgaggcagcgcggctatcgtggctggccacgacgggcgttccttgcgcagctgtgctcgacgttgtcactgaagcgggaagggactggctgctattgggcgaagtgccggggcaggatctcctgtcatctcaccttgctcctgccgagaaagtatccatcatggctgatgcaatgcggcggctgcatacgcttgatccggctacctgcccattcgaccaccaagcgaaacatcgcatcgagcgagcacgtactcggatggaagccggtcttgtcgatcaggatgatctggacgaagagcatcaggggctcgcgccagccgaactgttcgccaggctcaaggcgagcatgcccgacggcgaggatctcgtcgtgacccatggcgatgcctgcttgccgaatatcatggtggaaaatggccgcttttctggattcatcgactgtggccggctgggtgtggcggaccgctatcaggacatagcgttggctacccgtgatattgctgaagagcttggcggcgaatgggctgaccgcttcctcgtgctttacggtatcgccgctcccgattcgcagcgcatcgccttctatcgccttcttgacgagttcttctgagcgggactctggggttcgaaatgaccgaccaagcgacgcccaacctgccatcacgagatttcgattccaccgccgccttctatgaaaggttgggcttcggaatcgttttccgggacgccggctggatgatcctccagcgcggggatctcatgctggagttcttcgcccaccctagggggaggctaactgaaacacggaaggagacaataccggaaggaacccgcgctatgacggcaataaaaagacagaataaaacgcacggtgttgggtcgtttgttcataaacgcggggttcggtcccagggctggcactctgtcgataccccaccgagaccccattggggccaatacgcccgcgtttcttccttttccccaccccaccccccaagttcgggtgaaggcccagggctcgcagccaacgtcggggcggcaggccctgccatagcctcaggttactcatatatactttagattgatttaaaacttcatttttaatttaaaaggatctaggtgaagatcctttttgataatctcatgaccaaaatcccttaacgtgagttttcgttccactgagcgtcagaccccgtagaaaagatcaaaggatcttcttgagatcctttttttctgcgcgtaatctgctgcttgcaaacaaaaaaaccaccgctaccagcggtggtttgtttgccggatcaagagctaccaactctttttccgaaggtaactggcttcagcagagcgcagataccaaatactgtccttctagtgtagccgtagttaggccaccacttcaagaactctgtagcaccgcctacatacctcgctctgctaatcctgttaccagtggctgctgccagtggcgataagtcgtgtcttaccgggttggactcaagacgatagttaccggataaggcgcagcggtcgggctgaacggggggttcgtgcacacagcccagcttggagcgaacgacctacaccgaactgagatacctacagcgtgagctatgagaaagcgccacgcttcccgaagggagaaaggcggacaggtatccggtaagcggcagggtcggaacaggagagcgcacgagggagcttccagggggaaacgcctggtatctttatagtcctgtcgggtttcgccacctctgacttgagcgtcgatttttgtgatgctcgtcaggggggcggagcctatggaaaaacgccagcaacgcggcctttttacggttcctggccttttgctggccttttgctcacatgttctttcctgcgttatcccctgattctgctagcttaagcggccgcgatccacccaaggctggataaggaggggtgggcgcgcatggtgggggaggcgcaatgcagagaagtgggcgcacaccgtggggcgtgatagggaggggtgggcacacactatagggggcgtgatggggaggggtgggcgcacatcgtggagggggtgatggggaggggtggacgcacactgggggtgtgatggaaagggggacgcgatggataggggtgggcgcacactgggggacgcgacggggaggggtgagcacacactgggggtgtgatggagagggcgacgcaatagggaggggtgggcgcacaccagggacgcgatgatggggacgggtgggcgcacaccaggtggcatgatggggaggagtgggtacacaccatggggggcgtgatggggaggcgtgggcgtacaccggggggcgcgatggggaggggtgggcgcacaccgggggacgcgatggaggcggtgggtgcacacggggcgcgatgggtgggagtaggtgcacactgagggcacgattggggagacacgaaggagaggggtgggcgcacactgggggacgcgatggccgggacacgatgcggagaagtgggtgaataccggggtcgcgatgggcgccctggaaggacggcagtgctgctcacaggggccaggcccctcagagcgcgccccttgggggtaaccccagacgcttgttcccgagccgactccgtgcactcgacacaggatcccgcacccagggcgatgccgggggagagggcgaccccaaccagcaatgactcaggagaggagcacgcaaagacgcttcggggacactgctggggcgggatccgagggcgccgcgctctgcaggagcagcagcgcggggcccgacaccgggcgctcaaggaggcgctgggcgcgcgccttcccagctggggaggagacgggcgtggagcggaggcgtggccaggcccggagggggcggagctcgcggcacagcgcgcttcgcgggggcagagggggcgcaccttgggcgggcccacttaggggcggggctctagagggcggggaggggcggagcctgtcaggggcgggacgcggggcggagtcggggtgggggcggagccgggctgggggcgggacgcccgcgatagacgcgcgtgcaggcggggtcgccgcgcttaccttgggcttctcctcggacatggctgcgcgagcggcgcggggaggcggcgcgggggaagcagcgcggagcgggcgagtcacgctctcggccccgccgctctcccgccgcaactgtgcgcggggccgcgctttatcccccaaatcccggcgcacccgttggccggcacgggggtcacgtggctgcgcgcgttatctcgagagctcaagcttactagtgtggataaccgtattaccgccatgcat

SEQ ID NO: 43319 - DNA, 5279 bp, ARTIFICIAL SEQUENCE
  vector containing human replication origin
tagttattaatagtaatcaattacggggtcattagttcatagcccatatatggagttccgcgttacataacttacggtaaatggcccgcctggctgaccgcccaacgacccccgcccattgacgtcaataatgacgtatgttcccatagtaacgccaatagggactttccattgacgtcaatgggtggagtatttacggtaaactgcccacttggcagtacatcaagtgtatcatatgccaagtacgccccctattgacgtcaatgacggtaaatggcccgcctggcattatgcccagtacatgaccttatgggactttcctacttggcagtacatctacgtattagtcatcgctattaccatggtgatgcggttttggcagtacatcaatgggcgtggatagcggtttgactcacggggatttccaagtctccaccccattgacgtcaatgggagtttgttttggcaccaaaatcaacgggactttccaaaatgtcgtaacaactccgccccattgacgcaaatgggcggtaggcgtgtacggtgggaggtctatataagcagagctggtttagtgaaccgtcagatccgctagagcatgaccgagtacaagcccacggtgcgcctcgccacccgcgacgacgtcccccgggccgtacgcaccctcgccgccgcgttcgccgactaccccgccacgcgccacaccgtcgacccggaccgccacatcgagcgggtcaccgagctgcaagaactcttcctcacgcgcgtcgggctcgacatcggcaaggtgtgggtcgcggacgacggcgccgcggtggcggtctggaccacgccggagagcgtcgaagcgggggcggtgttcgccgagatcggcccgcgcatggccgagttgagcggttcccggctggccgcgcagcaacagatggaaggcctcctggcgccgcaccggcccaaggagcccgcgtggttcctggccaccgtcggcgtctcgcccgaccaccagggcaagggtctgggcagcgccgtcgtgctccccggagtggaggcggccgagcgcgccggggtgcccgccttcctggagacctccgcgccccgcaacctccccttctacgagcggctcggcttcaccgtcaccgccgacgtcgaggtgcccgaaggaccgcgcacctggtgcatgacccgcaagcccggtgcctagctgattggtctaaaatgagatacatcaacgctcctccatgttttttgttttctttttaaatgaaaaactttattttttaagaggagtttcaggttcatagcaaaattgagaggaaggtacattcaagctgaggaagttttcctctattcctagtttactgagagattgcatcatgaatgggtgttaaattttgtcaaatgctttttctgtgtctatcaatatgaccatgtgattttcttctttaacctgttgatgggacaaattacgttaattgattttcaaacgttgaaccacccttacatatctggaataaattctacttggttgtggtgtatattttttgatacattcttggattctttttgctaatattttgttgaaaatgtttgtatctttgttcatgagagatattggtctgttgttttcttttcttgtaatgtcattttctagttccggtattaaggtaatgctggcctagttgaatgatttaggaagtattccctctgcttctgtcttctgaaagagattgtagaaagttgatacaatttttttttctttaaatatttgatagaattctgcagtgaattctgcagtcgacggtaccgcgggcccgggatccaccggatctagataactgatcataatcagccataccacatttgtagaggttttacttgctttaaaaaacctcccacacctccccctgaacctgaaacataaaatgaatgcaattgttgttgttaacttgtttattgcagcttataatggttacaaataaagcaatagcatcacaaatttcacaaataaagcatttttttcactgcattctagttgtggtttgtccaaactcatcaatgtatcttaacgcgtaaattgtaagcgttaatattttgttaaaattcgcgttaaatttttgttaaatcagctcattttttaaccaataggccgaaatcggcgcggaacccctatttgtttatttttctaaatacattcaaatatgtatccgctcatgagacaataaccctgataaatgcttcaataatattgaaaaaggaagagtcaggatgaggatcgtttcgcatgattgaacaagatggattgcacgcaggttctccggccgcttgggtggagaggctattcggctatgactgggcacaacagacaatcggctgctctgatgccgccgtgttccggctgtcagcgcaggggcgcccggttctttttgtcaagaccgacctgtccggtgccctgaatgaactgcaagacgaggcagcgcggctatcgtggctggccacgacgggcgttccttgcgcagctgtgctcgacgttgtcactgaagcgggaagggactggctgctattgggcgaagtgccggggcaggatctcctgtcatctcaccttgctcctgccgagaaagtatccatcatggctgatgcaatgcggcggctgcatacgcttgatccggctacctgcccattcgaccaccaagcgaaacatcgcatcgagcgagcacgtactcggatggaagccggtcttgtcgatcaggatgatctggacgaagagcatcaggggctcgcgccagccgaactgttcgccaggctcaaggcgagcatgcccgacggcgaggatctcgtcgtgacccatggcgatgcctgcttgccgaatatcatggtggaaaatggccgcttttctggattcatcgactgtggccggctgggtgtggcggaccgctatcaggacatagcgttggctacccgtgatattgctgaagagcttggcggcgaatgggctgaccgcttcctcgtgctttacggtatcgccgctcccgattcgcagcgcatcgccttctatcgccttcttgacgagttcttctgagcgggactctggggttcgaaatgaccgaccaagcgacgcccaacctgccatcacgagatttcgattccaccgccgccttctatgaaaggttgggcttcggaatcgttttccgggacgccggctggatgatcctccagcgcggggatctcatgctggagttcttcgcccaccctagggggaggctaactgaaacacggaaggagacaataccggaaggaacccgcgctatgacggcaataaaaagacagaataaaacgcacggtgttgggtcgtttgttcataaacgcggggttcggtcccagggctggcactctgtcgataccccaccgagaccccattggggccaatacgcccgcgtttcttccttttccccaccccaccccccaagttcgggtgaaggcccagggctcgcagccaacgtcggggcggcaggccctgccatagcctcaggttactcatatatactttagattgatttaaaacttcatttttaatttaaaaggatctaggtgaagatcctttttgataatctcatgaccaaaatcccttaacgtgagttttcgttccactgagcgtcagaccccgtagaaaagatcaaaggatcttcttgagatcctttttttctgcgcgtaatctgctgcttgcaaacaaaaaaaccaccgctaccagcggtggtttgtttgccggatcaagagctaccaactctttttccgaaggtaactggcttcagcagagcgcagataccaaatactgtccttctagtgtagccgtagttaggccaccacttcaagaactctgtagcaccgcctacatacctcgctctgctaatcctgttaccagtggctgctgccagtggcgataagtcgtgtcttaccgggttggactcaagacgatagttaccggataaggcgcagcggtcgggctgaacggggggttcgtgcacacagcccagcttggagcgaacgacctacaccgaactgagatacctacagcgtgagctatgagaaagcgccacgcttcccgaagggagaaaggcggacaggtatccggtaagcggcagggtcggaacaggagagcgcacgagggagcttccagggggaaacgcctggtatctttatagtcctgtcgggtttcgccacctctgacttgagcgtcgatttttgtgatgctcgtcaggggggcggagcctatggaaaaacgccagcaacgcggcctttttacggttcctggccttttgctggccttttgctcacatgttctttcctgcgttatcccctgattctgctagcttaagcggccgcgatgaaagacatagtctactttttaattgccacctcaaagttaaccccaaattttccaaaattctaagttcaagtgggtagcgagtttgcccttcatgcagcacacttacctgtgagtgctagggagtggctgagagctcgggggtgggaggagaggcccactgcagtgcccaccacagtgcccgctgcaggggtggctgcaccccgagaatggtgggggcatcttcaggagcggcatgctggtggagggtagatgggagctctgacatggccctggagtgtggggggcagtggcagcagcaacagggcactctgaagcctgggcagggaaaggtgctgccggggtggtgggcagcaggtgtgggtggggtggggagccaaaggagctggggtgagacgggattagagatgctggctgcgggtggtggccggtggggctgttagggggagcagtgaggtctgagtgctggtggtgctccgagacggggaaagcctcacctgtgggcagagggaggagaaaggggtcagaatgggagcccagacctgggaaggaaagcccacaggctcactgccacagcatcctgcttctgtgacaagagggcacagcctctcagcacaggggaccctggagctgcagaagattctgtgtgggcagcaacacagctgagcaggctcaaggagcccaggcccaagcaagaaggtactaggaatgctgattccacacaaggccccatgccttttctgcagcatgagcagaagatatgcattctgtctctgagggtctctctaggatctgcttgtacacaggtgctcctcaggcctggaggatgatctgcagaagccagtggagcagatctcgagagctcaagcttactagtgtggataaccgtattaccgccatgcat

SEQ ID NO: 43320 - DNA, 5511 bp, ARTIFICIAL SEQUENCE
  vector containing human replication origin
tagttattaatagtaatcaattacggggtcattagttcatagcccatatatggagttccgcgttacataacttacggtaaatggcccgcctggctgaccgcccaacgacccccgcccattgacgtcaataatgacgtatgttcccatagtaacgccaatagggactttccattgacgtcaatgggtggagtatttacggtaaactgcccacttggcagtacatcaagtgtatcatatgccaagtacgccccctattgacgtcaatgacggtaaatggcccgcctggcattatgcccagtacatgaccttatgggactttcctacttggcagtacatctacgtattagtcatcgctattaccatggtgatgcggttttggcagtacatcaatgggcgtggatagcggtttgactcacggggatttccaagtctccaccccattgacgtcaatgggagtttgttttggcaccaaaatcaacgggactttccaaaatgtcgtaacaactccgccccattgacgcaaatgggcggtaggcgtgtacggtgggaggtctatataagcagagctggtttagtgaaccgtcagatccgctagagcatgaccgagtacaagcccacggtgcgcctcgccacccgcgacgacgtcccccgggccgtacgcaccctcgccgccgcgttcgccgactaccccgccacgcgccacaccgtcgacccggaccgccacatcgagcgggtcaccgagctgcaagaactcttcctcacgcgcgtcgggctcgacatcggcaaggtgtgggtcgcggacgacggcgccgcggtggcggtctggaccacgccggagagcgtcgaagcgggggcggtgttcgccgagatcggcccgcgcatggccgagttgagcggttcccggctggccgcgcagcaacagatggaaggcctcctggcgccgcaccggcccaaggagcccgcgtggttcctggccaccgtcggcgtctcgcccgaccaccagggcaagggtctgggcagcgccgtcgtgctccccggagtggaggcggccgagcgcgccggggtgcccgccttcctggagacctccgcgccccgcaacctccccttctacgagcggctcggcttcaccgtcaccgccgacgtcgaggtgcccgaaggaccgcgcacctggtgcatgacccgcaagcccggtgcctagctgattggtctaaaatgagatacatcaacgctcctccatgttttttgttttctttttaaatgaaaaactttattttttaagaggagtttcaggttcatagcaaaattgagaggaaggtacattcaagctgaggaagttttcctctattcctagtttactgagagattgcatcatgaatgggtgttaaattttgtcaaatgctttttctgtgtctatcaatatgaccatgtgattttcttctttaacctgttgatgggacaaattacgttaattgattttcaaacgttgaaccacccttacatatctggaataaattctacttggttgtggtgtatattttttgatacattcttggattctttttgctaatattttgttgaaaatgtttgtatctttgttcatgagagatattggtctgttgttttcttttcttgtaatgtcattttctagttccggtattaaggtaatgctggcctagttgaatgatttaggaagtattccctctgcttctgtcttctgaaagagattgtagaaagttgatacaatttttttttctttaaatatttgatagaattctgcagtgaattctgcagtcgacggtaccgcgggcccgggatccaccggatctagataactgatcataatcagccataccacatttgtagaggttttacttgctttaaaaaacctcccacacctccccctgaacctgaaacataaaatgaatgcaattgttgttgttaacttgtttattgcagcttataatggttacaaataaagcaatagcatcacaaatttcacaaataaagcatttttttcactgcattctagttgtggtttgtccaaactcatcaatgtatcttaacgcgtaaattgtaagcgttaatattttgttaaaattcgcgttaaatttttgttaaatcagctcattttttaaccaataggccgaaatcggcgcggaacccctatttgtttatttttctaaatacattcaaatatgtatccgctcatgagacaataaccctgataaatgcttcaataatattgaaaaaggaagagtcaggatgaggatcgtttcgcatgattgaacaagatggattgcacgcaggttctccggccgcttgggtggagaggctattcggctatgactgggcacaacagacaatcggctgctctgatgccgccgtgttccggctgtcagcgcaggggcgcccggttctttttgtcaagaccgacctgtccggtgccctgaatgaactgcaagacgaggcagcgcggctatcgtggctggccacgacgggcgttccttgcgcagctgtgctcgacgttgtcactgaagcgggaagggactggctgctattgggcgaagtgccggggcaggatctcctgtcatctcaccttgctcctgccgagaaagtatccatcatggctgatgcaatgcggcggctgcatacgcttgatccggctacctgcccattcgaccaccaagcgaaacatcgcatcgagcgagcacgtactcggatggaagccggtcttgtcgatcaggatgatctggacgaagagcatcaggggctcgcgccagccgaactgttcgccaggctcaaggcgagcatgcccgacggcgaggatctcgtcgtgacccatggcgatgcctgcttgccgaatatcatggtggaaaatggccgcttttctggattcatcgactgtggccggctgggtgtggcggaccgctatcaggacatagcgttggctacccgtgatattgctgaagagcttggcggcgaatgggctgaccgcttcctcgtgctttacggtatcgccgctcccgattcgcagcgcatcgccttctatcgccttcttgacgagttcttctgagcgggactctggggttcgaaatgaccgaccaagcgacgcccaacctgccatcacgagatttcgattccaccgccgccttctatgaaaggttgggcttcggaatcgttttccgggacgccggctggatgatcctccagcgcggggatctcatgctggagttcttcgcccaccctagggggaggctaactgaaacacggaaggagacaataccggaaggaacccgcgctatgacggcaataaaaagacagaataaaacgcacggtgttgggtcgtttgttcataaacgcggggttcggtcccagggctggcactctgtcgataccccaccgagaccccattggggccaatacgcccgcgtttcttccttttccccaccccaccccccaagttcgggtgaaggcccagggctcgcagccaacgtcggggcggcaggccctgccatagcctcaggttactcatatatactttagattgatttaaaacttcatttttaatttaaaaggatctaggtgaagatcctttttgataatctcatgaccaaaatcccttaacgtgagttttcgttccactgagcgtcagaccccgtagaaaagatcaaaggatcttcttgagatcctttttttctgcgcgtaatctgctgcttgcaaacaaaaaaaccaccgctaccagcggtggtttgtttgccggatcaagagctaccaactctttttccgaaggtaactggcttcagcagagcgcagataccaaatactgtccttctagtgtagccgtagttaggccaccacttcaagaactctgtagcaccgcctacatacctcgctctgctaatcctgttaccagtggctgctgccagtggcgataagtcgtgtcttaccgggttggactcaagacgatagttaccggataaggcgcagcggtcgggctgaacggggggttcgtgcacacagcccagcttggagcgaacgacctacaccgaactgagatacctacagcgtgagctatgagaaagcgccacgcttcccgaagggagaaaggcggacaggtatccggtaagcggcagggtcggaacaggagagcgcacgagggagcttccagggggaaacgcctggtatctttatagtcctgtcgggtttcgccacctctgacttgagcgtcgatttttgtgatgctcgtcaggggggcggagcctatggaaaaacgccagcaacgcggcctttttacggttcctggccttttgctggccttttgctcacatgttctttcctgcgttatcccctgattctgctagcttaagcggccgcgatagatgcagctttccagtagagagattgccacgagcaaagcacatgtctaaggaggaaagagtggcctgggggtgggggtgggggtaggggagctagaagatcagggtagagggggctggatgaaatacagaattgagggagggggagtgagagtaagaaatgacagaagctggggccagatggtgaggggccagataaaaataaaattagcatataaatggactggctttgctcaatcaaaggaggattttctttcttaaagaaagacagtggctcttttcctgatttttatgacttgagctcataaatcaaatcttcagagctaccgacaatgtcagcctgctgatgtttaggagtggagggtgactgaggaatgcggtgtgctgcggatagtcatgtcatcagcaaggatgtctcagagtctgcaaacccggacctctctgtattggacaaggctagggaatgactttgagaagaactgaatattaaaggaattatcaacttgagtagtaagagagtttctaagaatgatggcagagccactctgaagttcctgaatgaggtggaggagggggagaaagtggtgtggtaaggaacttcagtggagaaacagcccagagaactgggaaagcaatgacttggaagcagcaatgagttggtgttggaaaaggagtggctgccattgggaaggtttagagggtaaactttgagcttgaggaaaattaagttacatttaatgtgagaaaatggaggaaaaatgtgatctgtatctaacagagagaatgggattgagttgagtatctaacacagataatgggattaaaaaaccccaagaggatgaagcctcagagtagcataaaggggctgggcagcagaagagctctgggccaagctcaccactatggaggaagcaggaagggtgcccagggatggcgggcgggggcttgggagcaaggccatgggacatcggcactgtaaagggatggggaggttagagggtgtatggtggttgcatcgtagttagtagggagccttgtgaattgtcaccttagaggcccaaccaaaaagtgagcaagccagccatctcgagagctcaagcttactagtgtggataaccgtattaccgccatgcat

SEQ ID NO: 43321 - DNA, 5429 bp, ARTIFICIAL SEQUENCE
  vector containing human replication origin
tagttattaatagtaatcaattacggggtcattagttcatagcccatatatggagttccgcgttacataacttacggtaaatggcccgcctggctgaccgcccaacgacccccgcccattgacgtcaataatgacgtatgttcccatagtaacgccaatagggactttccattgacgtcaatgggtggagtatttacggtaaactgcccacttggcagtacatcaagtgtatcatatgccaagtacgccccctattgacgtcaatgacggtaaatggcccgcctggcattatgcccagtacatgaccttatgggactttcctacttggcagtacatctacgtattagtcatcgctattaccatggtgatgcggttttggcagtacatcaatgggcgtggatagcggtttgactcacggggatttccaagtctccaccccattgacgtcaatgggagtttgttttggcaccaaaatcaacgggactttccaaaatgtcgtaacaactccgccccattgacgcaaatgggcggtaggcgtgtacggtgggaggtctatataagcagagctggtttagtgaaccgtcagatccgctagagcatgaccgagtacaagcccacggtgcgcctcgccacccgcgacgacgtcccccgggccgtacgcaccctcgccgccgcgttcgccgactaccccgccacgcgccacaccgtcgacccggaccgccacatcgagcgggtcaccgagctgcaagaactcttcctcacgcgcgtcgggctcgacatcggcaaggtgtgggtcgcggacgacggcgccgcggtggcggtctggaccacgccggagagcgtcgaagcgggggcggtgttcgccgagatcggcccgcgcatggccgagttgagcggttcccggctggccgcgcagcaacagatggaaggcctcctggcgccgcaccggcccaaggagcccgcgtggttcctggccaccgtcggcgtctcgcccgaccaccagggcaagggtctgggcagcgccgtcgtgctccccggagtggaggcggccgagcgcgccggggtgcccgccttcctggagacctccgcgccccgcaacctccccttctacgagcggctcggcttcaccgtcaccgccgacgtcgaggtgcccgaaggaccgcgcacctggtgcatgacccgcaagcccggtgcctagctgattggtctaaaatgagatacatcaacgctcctccatgttttttgttttctttttaaatgaaaaactttattttttaagaggagtttcaggttcatagcaaaattgagaggaaggtacattcaagctgaggaagttttcctctattcctagtttactgagagattgcatcatgaatgggtgttaaattttgtcaaatgctttttctgtgtctatcaatatgaccatgtgattttcttctttaacctgttgatgggacaaattacgttaattgattttcaaacgttgaaccacccttacatatctggaataaattctacttggttgtggtgtatattttttgatacattcttggattctttttgctaatattttgttgaaaatgtttgtatctttgttcatgagagatattggtctgttgttttcttttcttgtaatgtcattttctagttccggtattaaggtaatgctggcctagttgaatgatttaggaagtattccctctgcttctgtcttctgaaagagattgtagaaagttgatacaatttttttttctttaaatatttgatagaattctgcagtgaattctgcagtcgacggtaccgcgggcccgggatccaccggatctagataactgatcataatcagccataccacatttgtagaggttttacttgctttaaaaaacctcccacacctccccctgaacctgaaacataaaatgaatgcaattgttgttgttaacttgtttattgcagcttataatggttacaaataaagcaatagcatcacaaatttcacaaataaagcatttttttcactgcattctagttgtggtttgtccaaactcatcaatgtatcttaacgcgtaaattgtaagcgttaatattttgttaaaattcgcgttaaatttttgttaaatcagctcattttttaaccaataggccgaaatcggcgcggaacccctatttgtttatttttctaaatacattcaaatatgtatccgctcatgagacaataaccctgataaatgcttcaataatattgaaaaaggaagagtcaggatgaggatcgtttcgcatgattgaacaagatggattgcacgcaggttctccggccgcttgggtggagaggctattcggctatgactgggcacaacagacaatcggctgctctgatgccgccgtgttccggctgtcagcgcaggggcgcccggttctttttgtcaagaccgacctgtccggtgccctgaatgaactgcaagacgaggcagcgcggctatcgtggctggccacgacgggcgttccttgcgcagctgtgctcgacgttgtcactgaagcgggaagggactggctgctattgggcgaagtgccggggcaggatctcctgtcatctcaccttgctcctgccgagaaagtatccatcatggctgatgcaatgcggcggctgcatacgcttgatccggctacctgcccattcgaccaccaagcgaaacatcgcatcgagcgagcacgtactcggatggaagccggtcttgtcgatcaggatgatctggacgaagagcatcaggggctcgcgccagccgaactgttcgccaggctcaaggcgagcatgcccgacggcgaggatctcgtcgtgacccatggcgatgcctgcttgccgaatatcatggtggaaaatggccgcttttctggattcatcgactgtggccggctgggtgtggcggaccgctatcaggacatagcgttggctacccgtgatattgctgaagagcttggcggcgaatgggctgaccgcttcctcgtgctttacggtatcgccgctcccgattcgcagcgcatcgccttctatcgccttcttgacgagttcttctgagcgggactctggggttcgaaatgaccgaccaagcgacgcccaacctgccatcacgagatttcgattccaccgccgccttctatgaaaggttgggcttcggaatcgttttccgggacgccggctggatgatcctccagcgcggggatctcatgctggagttcttcgcccaccctagggggaggctaactgaaacacggaaggagacaataccggaaggaacccgcgctatgacggcaataaaaagacagaataaaacgcacggtgttgggtcgtttgttcataaacgcggggttcggtcccagggctggcactctgtcgataccccaccgagaccccattggggccaatacgcccgcgtttcttccttttccccaccccaccccccaagttcgggtgaaggcccagggctcgcagccaacgtcggggcggcaggccctgccatagcctcaggttactcatatatactttagattgatttaaaacttcatttttaatttaaaaggatctaggtgaagatcctttttgataatctcatgaccaaaatcccttaacgtgagttttcgttccactgagcgtcagaccccgtagaaaagatcaaaggatcttcttgagatcctttttttctgcgcgtaatctgctgcttgcaaacaaaaaaaccaccgctaccagcggtggtttgtttgccggatcaagagctaccaactctttttccgaaggtaactggcttcagcagagcgcagataccaaatactgtccttctagtgtagccgtagttaggccaccacttcaagaactctgtagcaccgcctacatacctcgctctgctaatcctgttaccagtggctgctgccagtggcgataagtcgtgtcttaccgggttggactcaagacgatagttaccggataaggcgcagcggtcgggctgaacggggggttcgtgcacacagcccagcttggagcgaacgacctacaccgaactgagatacctacagcgtgagctatgagaaagcgccacgcttcccgaagggagaaaggcggacaggtatccggtaagcggcagggtcggaacaggagagcgcacgagggagcttccagggggaaacgcctggtatctttatagtcctgtcgggtttcgccacctctgacttgagcgtcgatttttgtgatgctcgtcaggggggcggagcctatggaaaaacgccagcaacgcggcctttttacggttcctggccttttgctggccttttgctcacatgttctttcctgcgttatcccctgattctgctagcttaagcggccgcgatgacagatgatttaagctgggggtgggtgggtgggagagataaggaggccccagccccatgcagagaatggcacatgatgaccttggtttatttaaagtggagtgctgccatggccagctgtgccccaggggtgccaggcctacacaggcctaggcggtcagctgtgccctctgcccagggctcagcctttactaggtttctgatgtccttatgctctgacatcacctcaggtcctgtgacttacccccctcccactcagcagggaccttgttctgaagactttggccttttcttggatgctctcgggcagtgtggcaggtggtgtcaggtggcagtgggtgatggggaggcttggaggctggctgggggctgggggtggagaggtaccactttgtcctgcatggctggctctgggtgtaagtgcagtgagtcacacctttcaggtagtggtgaggagagagggcagtgcatggaccttgggtatgtgtgggtgtggggttcacaccccatatgttcccatcttctgagaagtctaatggctgatctgcatctgcatgtactgtgggacaggcttgcataggactgtgtgacttgtgggtgtgagtgtggggatgtgaggatgggggttacatgtgcctgtggatttccagtgagtacacctgtcttagacctgagggatctgggtctgtgggcagaggtagtgacatgccatacagggccagtgggagtgtgtgcactcggtgagtgtggggtgcgtggggttggtctatggtggtgatgggataggtattgagtgtgatactgggcttgggggttgggggtgagtagaggtcacagtagagaatgaccacaaaatttcaatgtaccttgatctgtctttattttaatttaagctcggcctctgccagggctcaggttgctgggtaattgttggtagtaggggcagaatttagggcctgaagatgtccttggaggagggagacatgccaccttcagcaatatctcgagagctcaagcttactagtgtggataaccgtattaccgccatgcat

SEQ ID NO: 43322 - DNA, 5529 bp, ARTIFICIAL SEQUENCE
  vector containing human replication origin
tagttattaatagtaatcaattacggggtcattagttcatagcccatatatggagttccgcgttacataacttacggtaaatggcccgcctggctgaccgcccaacgacccccgcccattgacgtcaataatgacgtatgttcccatagtaacgccaatagggactttccattgacgtcaatgggtggagtatttacggtaaactgcccacttggcagtacatcaagtgtatcatatgccaagtacgccccctattgacgtcaatgacggtaaatggcccgcctggcattatgcccagtacatgaccttatgggactttcctacttggcagtacatctacgtattagtcatcgctattaccatggtgatgcggttttggcagtacatcaatgggcgtggatagcggtttgactcacggggatttccaagtctccaccccattgacgtcaatgggagtttgttttggcaccaaaatcaacgggactttccaaaatgtcgtaacaactccgccccattgacgcaaatgggcggtaggcgtgtacggtgggaggtctatataagcagagctggtttagtgaaccgtcagatccgctagagcatgaccgagtacaagcccacggtgcgcctcgccacccgcgacgacgtcccccgggccgtacgcaccctcgccgccgcgttcgccgactaccccgccacgcgccacaccgtcgacccggaccgccacatcgagcgggtcaccgagctgcaagaactcttcctcacgcgcgtcgggctcgacatcggcaaggtgtgggtcgcggacgacggcgccgcggtggcggtctggaccacgccggagagcgtcgaagcgggggcggtgttcgccgagatcggcccgcgcatggccgagttgagcggttcccggctggccgcgcagcaacagatggaaggcctcctggcgccgcaccggcccaaggagcccgcgtggttcctggccaccgtcggcgtctcgcccgaccaccagggcaagggtctgggcagcgccgtcgtgctccccggagtggaggcggccgagcgcgccggggtgcccgccttcctggagacctccgcgccccgcaacctccccttctacgagcggctcggcttcaccgtcaccgccgacgtcgaggtgcccgaaggaccgcgcacctggtgcatgacccgcaagcccggtgcctagctgattggtctaaaatgagatacatcaacgctcctccatgttttttgttttctttttaaatgaaaaactttattttttaagaggagtttcaggttcatagcaaaattgagaggaaggtacattcaagctgaggaagttttcctctattcctagtttactgagagattgcatcatgaatgggtgttaaattttgtcaaatgctttttctgtgtctatcaatatgaccatgtgattttcttctttaacctgttgatgggacaaattacgttaattgattttcaaacgttgaaccacccttacatatctggaataaattctacttggttgtggtgtatattttttgatacattcttggattctttttgctaatattttgttgaaaatgtttgtatctttgttcatgagagatattggtctgttgttttcttttcttgtaatgtcattttctagttccggtattaaggtaatgctggcctagttgaatgatttaggaagtattccctctgcttctgtcttctgaaagagattgtagaaagttgatacaatttttttttctttaaatatttgatagaattctgcagtgaattctgcagtcgacggtaccgcgggcccgggatccaccggatctagataactgatcataatcagccataccacatttgtagaggttttacttgctttaaaaaacctcccacacctccccctgaacctgaaacataaaatgaatgcaattgttgttgttaacttgtttattgcagcttataatggttacaaataaagcaatagcatcacaaatttcacaaataaagcatttttttcactgcattctagttgtggtttgtccaaactcatcaatgtatcttaacgcgtaaattgtaagcgttaatattttgttaaaattcgcgttaaatttttgttaaatcagctcattttttaaccaataggccgaaatcggcgcggaacccctatttgtttatttttctaaatacattcaaatatgtatccgctcatgagacaataaccctgataaatgcttcaataatattgaaaaaggaagagtcaggatgaggatcgtttcgcatgattgaacaagatggattgcacgcaggttctccggccgcttgggtggagaggctattcggctatgactgggcacaacagacaatcggctgctctgatgccgccgtgttccggctgtcagcgcaggggcgcccggttctttttgtcaagaccgacctgtccggtgccctgaatgaactgcaagacgaggcagcgcggctatcgtggctggccacgacgggcgttccttgcgcagctgtgctcgacgttgtcactgaagcgggaagggactggctgctattgggcgaagtgccggggcaggatctcctgtcatctcaccttgctcctgccgagaaagtatccatcatggctgatgcaatgcggcggctgcatacgcttgatccggctacctgcccattcgaccaccaagcgaaacatcgcatcgagcgagcacgtactcggatggaagccggtcttgtcgatcaggatgatctggacgaagagcatcaggggctcgcgccagccgaactgttcgccaggctcaaggcgagcatgcccgacggcgaggatctcgtcgtgacccatggcgatgcctgcttgccgaatatcatggtggaaaatggccgcttttctggattcatcgactgtggccggctgggtgtggcggaccgctatcaggacatagcgttggctacccgtgatattgctgaagagcttggcggcgaatgggctgaccgcttcctcgtgctttacggtatcgccgctcccgattcgcagcgcatcgccttctatcgccttcttgacgagttcttctgagcgggactctggggttcgaaatgaccgaccaagcgacgcccaacctgccatcacgagatttcgattccaccgccgccttctatgaaaggttgggcttcggaatcgttttccgggacgccggctggatgatcctccagcgcggggatctcatgctggagttcttcgcccaccctagggggaggctaactgaaacacggaaggagacaataccggaaggaacccgcgctatgacggcaataaaaagacagaataaaacgcacggtgttgggtcgtttgttcataaacgcggggttcggtcccagggctggcactctgtcgataccccaccgagaccccattggggccaatacgcccgcgtttcttccttttccccaccccaccccccaagttcgggtgaaggcccagggctcgcagccaacgtcggggcggcaggccctgccatagcctcaggttactcatatatactttagattgatttaaaacttcatttttaatttaaaaggatctaggtgaagatcctttttgataatctcatgaccaaaatcccttaacgtgagttttcgttccactgagcgtcagaccccgtagaaaagatcaaaggatcttcttgagatcctttttttctgcgcgtaatctgctgcttgcaaacaaaaaaaccaccgctaccagcggtggtttgtttgccggatcaagagctaccaactctttttccgaaggtaactggcttcagcagagcgcagataccaaatactgtccttctagtgtagccgtagttaggccaccacttcaagaactctgtagcaccgcctacatacctcgctctgctaatcctgttaccagtggctgctgccagtggcgataagtcgtgtcttaccgggttggactcaagacgatagttaccggataaggcgcagcggtcgggctgaacggggggttcgtgcacacagcccagcttggagcgaacgacctacaccgaactgagatacctacagcgtgagctatgagaaagcgccacgcttcccgaagggagaaaggcggacaggtatccggtaagcggcagggtcggaacaggagagcgcacgagggagcttccagggggaaacgcctggtatctttatagtcctgtcgggtttcgccacctctgacttgagcgtcgatttttgtgatgctcgtcaggggggcggagcctatggaaaaacgccagcaacgcggcctttttacggttcctggccttttgctggccttttgctcacatgttctttcctgcgttatcccctgattctgctagcttaagcggccgcgatcccggtaggtctcgccgaagactccgcggccgccagccgccggcacctcacttccgcccgccgcgagcgccgagcgtgtagatccgcctggcagtcgagcgccgagtcctcgatgggcggagccttcaggggagggtagaggaggggaggagaccggcgcgggtgctggaggtcagcaggggccgtgggcggtggacgctggaatgccttgggttccgagggacccagctgcctgaatggacacgagtaggaggtttttgctgggcgtctttgcggtggcgggaagcggtgagggagggaaagaaggatacaagctcaaggggcaggccgggtgcaccatccatccccgtgccctcgggtcatctcagggagactgtgggatgatagtgcgtttgtgggccacagttcacaacgatgggccctgcatcgggtcagaggacccctccggaacagggggatgcacaaggtcaagagaatgcatggaatcagagggctgcaccaggtcaggggggctgcaccgagaccagaggaagcatcaggtcaggaggatgcactggagtgtgcatccccagggggccacactgggtaaggaggatgcaccaggttaggaggcagcactgggtcagaaggatgcactggaatcaggggactgtaccaggttggggggcgtgcctcaggtcaggaggaggcactggggtccgggggcaacattgagtcaggggcagccctaggtcaggaggatgcatggggtcagggggctgcaggggtttgagggctgcactgggtcagggcgccataccaggtcaggggatgcgcaggatcgggggagatgcccggggtcgtgggatgctgggggttggggggatgctcggggtcggggagttctcgaggtcgggggatactcggggtcagggggttctcagggttggggggatacttagggtcaggggatgctctaggttgggggaagctcgggttcaggggctatggccagggaggaaggacaatcaggaaagtgggggtagcggattctggaagctaaatagtttcaggaaggaggaattgatagccaatgttcagaagtactgtgaggccaagacatctcgagagctcaagcttactagtgtggataaccgtattaccgccatgcat

SEQ ID NO: 43323 - DNA, 5770 bp, ARTIFICIAL SEQUENCE
  vector containing human replication origin
tagttattaatagtaatcaattacggggtcattagttcatagcccatatatggagttccgcgttacataacttacggtaaatggcccgcctggctgaccgcccaacgacccccgcccattgacgtcaataatgacgtatgttcccatagtaacgccaatagggactttccattgacgtcaatgggtggagtatttacggtaaactgcccacttggcagtacatcaagtgtatcatatgccaagtacgccccctattgacgtcaatgacggtaaatggcccgcctggcattatgcccagtacatgaccttatgggactttcctacttggcagtacatctacgtattagtcatcgctattaccatggtgatgcggttttggcagtacatcaatgggcgtggatagcggtttgactcacggggatttccaagtctccaccccattgacgtcaatgggagtttgttttggcaccaaaatcaacgggactttccaaaatgtcgtaacaactccgccccattgacgcaaatgggcggtaggcgtgtacggtgggaggtctatataagcagagctggtttagtgaaccgtcagatccgctagagcatgaccgagtacaagcccacggtgcgcctcgccacccgcgacgacgtcccccgggccgtacgcaccctcgccgccgcgttcgccgactaccccgccacgcgccacaccgtcgacccggaccgccacatcgagcgggtcaccgagctgcaagaactcttcctcacgcgcgtcgggctcgacatcggcaaggtgtgggtcgcggacgacggcgccgcggtggcggtctggaccacgccggagagcgtcgaagcgggggcggtgttcgccgagatcggcccgcgcatggccgagttgagcggttcccggctggccgcgcagcaacagatggaaggcctcctggcgccgcaccggcccaaggagcccgcgtggttcctggccaccgtcggcgtctcgcccgaccaccagggcaagggtctgggcagcgccgtcgtgctccccggagtggaggcggccgagcgcgccggggtgcccgccttcctggagacctccgcgccccgcaacctccccttctacgagcggctcggcttcaccgtcaccgccgacgtcgaggtgcccgaaggaccgcgcacctggtgcatgacccgcaagcccggtgcctagctgattggtctaaaatgagatacatcaacgctcctccatgttttttgttttctttttaaatgaaaaactttattttttaagaggagtttcaggttcatagcaaaattgagaggaaggtacattcaagctgaggaagttttcctctattcctagtttactgagagattgcatcatgaatgggtgttaaattttgtcaaatgctttttctgtgtctatcaatatgaccatgtgattttcttctttaacctgttgatgggacaaattacgttaattgattttcaaacgttgaaccacccttacatatctggaataaattctacttggttgtggtgtatattttttgatacattcttggattctttttgctaatattttgttgaaaatgtttgtatctttgttcatgagagatattggtctgttgttttcttttcttgtaatgtcattttctagttccggtattaaggtaatgctggcctagttgaatgatttaggaagtattccctctgcttctgtcttctgaaagagattgtagaaagttgatacaatttttttttctttaaatatttgatagaattctgcagtgaattctgcagtcgacggtaccgcgggcccgggatccaccggatctagataactgatcataatcagccataccacatttgtagaggttttacttgctttaaaaaacctcccacacctccccctgaacctgaaacataaaatgaatgcaattgttgttgttaacttgtttattgcagcttataatggttacaaataaagcaatagcatcacaaatttcacaaataaagcatttttttcactgcattctagttgtggtttgtccaaactcatcaatgtatcttaacgcgtaaattgtaagcgttaatattttgttaaaattcgcgttaaatttttgttaaatcagctcattttttaaccaataggccgaaatcggcgcggaacccctatttgtttatttttctaaatacattcaaatatgtatccgctcatgagacaataaccctgataaatgcttcaataatattgaaaaaggaagagtcaggatgaggatcgtttcgcatgattgaacaagatggattgcacgcaggttctccggccgcttgggtggagaggctattcggctatgactgggcacaacagacaatcggctgctctgatgccgccgtgttccggctgtcagcgcaggggcgcccggttctttttgtcaagaccgacctgtccggtgccctgaatgaactgcaagacgaggcagcgcggctatcgtggctggccacgacgggcgttccttgcgcagctgtgctcgacgttgtcactgaagcgggaagggactggctgctattgggcgaagtgccggggcaggatctcctgtcatctcaccttgctcctgccgagaaagtatccatcatggctgatgcaatgcggcggctgcatacgcttgatccggctacctgcccattcgaccaccaagcgaaacatcgcatcgagcgagcacgtactcggatggaagccggtcttgtcgatcaggatgatctggacgaagagcatcaggggctcgcgccagccgaactgttcgccaggctcaaggcgagcatgcccgacggcgaggatctcgtcgtgacccatggcgatgcctgcttgccgaatatcatggtggaaaatggccgcttttctggattcatcgactgtggccggctgggtgtggcggaccgctatcaggacatagcgttggctacccgtgatattgctgaagagcttggcggcgaatgggctgaccgcttcctcgtgctttacggtatcgccgctcccgattcgcagcgcatcgccttctatcgccttcttgacgagttcttctgagcgggactctggggttcgaaatgaccgaccaagcgacgcccaacctgccatcacgagatttcgattccaccgccgccttctatgaaaggttgggcttcggaatcgttttccgggacgccggctggatgatcctccagcgcggggatctcatgctggagttcttcgcccaccctagggggaggctaactgaaacacggaaggagacaataccggaaggaacccgcgctatgacggcaataaaaagacagaataaaacgcacggtgttgggtcgtttgttcataaacgcggggttcggtcccagggctggcactctgtcgataccccaccgagaccccattggggccaatacgcccgcgtttcttccttttccccaccccaccccccaagttcgggtgaaggcccagggctcgcagccaacgtcggggcggcaggccctgccatagcctcaggttactcatatatactttagattgatttaaaacttcatttttaatttaaaaggatctaggtgaagatcctttttgataatctcatgaccaaaatcccttaacgtgagttttcgttccactgagcgtcagaccccgtagaaaagatcaaaggatcttcttgagatcctttttttctgcgcgtaatctgctgcttgcaaacaaaaaaaccaccgctaccagcggtggtttgtttgccggatcaagagctaccaactctttttccgaaggtaactggcttcagcagagcgcagataccaaatactgtccttctagtgtagccgtagttaggccaccacttcaagaactctgtagcaccgcctacatacctcgctctgctaatcctgttaccagtggctgctgccagtggcgataagtcgtgtcttaccgggttggactcaagacgatagttaccggataaggcgcagcggtcgggctgaacggggggttcgtgcacacagcccagcttggagcgaacgacctacaccgaactgagatacctacagcgtgagctatgagaaagcgccacgcttcccgaagggagaaaggcggacaggtatccggtaagcggcagggtcggaacaggagagcgcacgagggagcttccagggggaaacgcctggtatctttatagtcctgtcgggtttcgccacctctgacttgagcgtcgatttttgtgatgctcgtcaggggggcggagcctatggaaaaacgccagcaacgcggcctttttacggttcctggccttttgctggccttttgctcacatgttctttcctgcgttatcccctgattctgctagcttaagcggccgcgatttaatgctttgacccatctaagatacgaggacaggagactggagaagtaaacgaaaggcaatggccgaggggtaaggcggggaacacagcaggaaaaggacaggttccccttcaccttcacccccagtgttggcaacgtcccagggattctcggagctgaagcttcttcagaaaacagtcagcttaattaagatcctgcccttggggaatctagaataaatggcgagtagtgggcagctttccccaccagtcgcaggatctaaaagcaatgagtgacggttgtctgtgcagcagtcagagggaagagcgacagttccagacgaggggcagtcggacttctccgcagcctaccgccagcttggagtgcagatctccaccgactgcgccacagacagtctcagtccccagcagtcacaatatttgcactcccctttcttcctggcctttcaacccctccctttccttcctcctcacccctcccaccccgcacccgagagacagcctgccgtcccaggtccagcccgcgcctctgcgcacctcccggcacccggcgcaggtcgccggccagggcacacacgcgtccccgcctgctcgccggcccgcaaggcccgggctgcggcggccgcgggcgcgggaggcggaggcgcaggcgccgggctccgtggcagcccggcccagccccgccccgccccaccctccggccctcccctccgcttagccgtgctctcccgccgagctccgccgccagctccgtgctctgcccggcccgtacgccgctcgccaccgcggctccccgggcgggaaggctgcgccggctcccgccaagggggaggcgccaccccgccccggggcggttgtcttgctgggactcctgggccggtcacaaagcccctctccgctgacccggagggacgggagtcgggtgcgcgacggcggctccccacccctgcactcagccgcccgccccgctcctcctccttccctccctgtccctcctcctctcccaccccccgagggctcgcacaccccgcgggcgggaaggtgccgccctcggggcggacaaaggggcaggccgggcgggaggggctgtagccggcacgcgcggccgcgggagggcccgcctcgccccgggccgccgacctgacacctgctgggcagcctgcgcggcctggggcgaaggccagcgggcggcggggtgggaagcgccagcgcaggggcgtgtgttcgggagggggtcgcggacaggtcaggcggcttgggacccaccccacccgggcaatagtgacctactgcttcgctagcgtcccctttcaggtcttaactggactttaaagatcttttatctcgagagctcaagcttactagtgtggataaccgtattaccgccatgcat

SEQ ID NO: 43324 - DNA, 5429 bp, ARTIFICIAL SEQUENCE
  vector containing human replication origin
tagttattaatagtaatcaattacggggtcattagttcatagcccatatatggagttccgcgttacataacttacggtaaatggcccgcctggctgaccgcccaacgacccccgcccattgacgtcaataatgacgtatgttcccatagtaacgccaatagggactttccattgacgtcaatgggtggagtatttacggtaaactgcccacttggcagtacatcaagtgtatcatatgccaagtacgccccctattgacgtcaatgacggtaaatggcccgcctggcattatgcccagtacatgaccttatgggactttcctacttggcagtacatctacgtattagtcatcgctattaccatggtgatgcggttttggcagtacatcaatgggcgtggatagcggtttgactcacggggatttccaagtctccaccccattgacgtcaatgggagtttgttttggcaccaaaatcaacgggactttccaaaatgtcgtaacaactccgccccattgacgcaaatgggcggtaggcgtgtacggtgggaggtctatataagcagagctggtttagtgaaccgtcagatccgctagagcatgaccgagtacaagcccacggtgcgcctcgccacccgcgacgacgtcccccgggccgtacgcaccctcgccgccgcgttcgccgactaccccgccacgcgccacaccgtcgacccggaccgccacatcgagcgggtcaccgagctgcaagaactcttcctcacgcgcgtcgggctcgacatcggcaaggtgtgggtcgcggacgacggcgccgcggtggcggtctggaccacgccggagagcgtcgaagcgggggcggtgttcgccgagatcggcccgcgcatggccgagttgagcggttcccggctggccgcgcagcaacagatggaaggcctcctggcgccgcaccggcccaaggagcccgcgtggttcctggccaccgtcggcgtctcgcccgaccaccagggcaagggtctgggcagcgccgtcgtgctccccggagtggaggcggccgagcgcgccggggtgcccgccttcctggagacctccgcgccccgcaacctccccttctacgagcggctcggcttcaccgtcaccgccgacgtcgaggtgcccgaaggaccgcgcacctggtgcatgacccgcaagcccggtgcctagctgattggtctaaaatgagatacatcaacgctcctccatgttttttgttttctttttaaatgaaaaactttattttttaagaggagtttcaggttcatagcaaaattgagaggaaggtacattcaagctgaggaagttttcctctattcctagtttactgagagattgcatcatgaatgggtgttaaattttgtcaaatgctttttctgtgtctatcaatatgaccatgtgattttcttctttaacctgttgatgggacaaattacgttaattgattttcaaacgttgaaccacccttacatatctggaataaattctacttggttgtggtgtatattttttgatacattcttggattctttttgctaatattttgttgaaaatgtttgtatctttgttcatgagagatattggtctgttgttttcttttcttgtaatgtcattttctagttccggtattaaggtaatgctggcctagttgaatgatttaggaagtattccctctgcttctgtcttctgaaagagattgtagaaagttgatacaatttttttttctttaaatatttgatagaattctgcagtgaattctgcagtcgacggtaccgcgggcccgggatccaccggatctagataactgatcataatcagccataccacatttgtagaggttttacttgctttaaaaaacctcccacacctccccctgaacctgaaacataaaatgaatgcaattgttgttgttaacttgtttattgcagcttataatggttacaaataaagcaatagcatcacaaatttcacaaataaagcatttttttcactgcattctagttgtggtttgtccaaactcatcaatgtatcttaacgcgtaaattgtaagcgttaatattttgttaaaattcgcgttaaatttttgttaaatcagctcattttttaaccaataggccgaaatcggcgcggaacccctatttgtttatttttctaaatacattcaaatatgtatccgctcatgagacaataaccctgataaatgcttcaataatattgaaaaaggaagagtcaggatgaggatcgtttcgcatgattgaacaagatggattgcacgcaggttctccggccgcttgggtggagaggctattcggctatgactgggcacaacagacaatcggctgctctgatgccgccgtgttccggctgtcagcgcaggggcgcccggttctttttgtcaagaccgacctgtccggtgccctgaatgaactgcaagacgaggcagcgcggctatcgtggctggccacgacgggcgttccttgcgcagctgtgctcgacgttgtcactgaagcgggaagggactggctgctattgggcgaagtgccggggcaggatctcctgtcatctcaccttgctcctgccgagaaagtatccatcatggctgatgcaatgcggcggctgcatacgcttgatccggctacctgcccattcgaccaccaagcgaaacatcgcatcgagcgagcacgtactcggatggaagccggtcttgtcgatcaggatgatctggacgaagagcatcaggggctcgcgccagccgaactgttcgccaggctcaaggcgagcatgcccgacggcgaggatctcgtcgtgacccatggcgatgcctgcttgccgaatatcatggtggaaaatggccgcttttctggattcatcgactgtggccggctgggtgtggcggaccgctatcaggacatagcgttggctacccgtgatattgctgaagagcttggcggcgaatgggctgaccgcttcctcgtgctttacggtatcgccgctcccgattcgcagcgcatcgccttctatcgccttcttgacgagttcttctgagcgggactctggggttcgaaatgaccgaccaagcgacgcccaacctgccatcacgagatttcgattccaccgccgccttctatgaaaggttgggcttcggaatcgttttccgggacgccggctggatgatcctccagcgcggggatctcatgctggagttcttcgcccaccctagggggaggctaactgaaacacggaaggagacaataccggaaggaacccgcgctatgacggcaataaaaagacagaataaaacgcacggtgttgggtcgtttgttcataaacgcggggttcggtcccagggctggcactctgtcgataccccaccgagaccccattggggccaatacgcccgcgtttcttccttttccccaccccaccccccaagttcgggtgaaggcccagggctcgcagccaacgtcggggcggcaggccctgccatagcctcaggttactcatatatactttagattgatttaaaacttcatttttaatttaaaaggatctaggtgaagatcctttttgataatctcatgaccaaaatcccttaacgtgagttttcgttccactgagcgtcagaccccgtagaaaagatcaaaggatcttcttgagatcctttttttctgcgcgtaatctgctgcttgcaaacaaaaaaaccaccgctaccagcggtggtttgtttgccggatcaagagctaccaactctttttccgaaggtaactggcttcagcagagcgcagataccaaatactgtccttctagtgtagccgtagttaggccaccacttcaagaactctgtagcaccgcctacatacctcgctctgctaatcctgttaccagtggctgctgccagtggcgataagtcgtgtcttaccgggttggactcaagacgatagttaccggataaggcgcagcggtcgggctgaacggggggttcgtgcacacagcccagcttggagcgaacgacctacaccgaactgagatacctacagcgtgagctatgagaaagcgccacgcttcccgaagggagaaaggcggacaggtatccggtaagcggcagggtcggaacaggagagcgcacgagggagcttccagggggaaacgcctggtatctttatagtcctgtcgggtttcgccacctctgacttgagcgtcgatttttgtgatgctcgtcaggggggcggagcctatggaaaaacgccagcaacgcggcctttttacggttcctggccttttgctggccttttgctcacatgttctttcctgcgttatcccctgattctgctagcttaagcggccgcgatcatcctccgcatctcctccctgcatttgatcttgttgattcctggctgctacaagggcctgggggccacagtctcaactgagcatagcagcaccgctgctatgggtctccagctcagggaggccccatccgggatccaggcctgagttctcacggccttgcaacttgatttttccccttccatccagaaagcattgggcagggggtaaggggaggtcacaagccacatctgcagacactgcagagcccctgggtgcgctcaggagtcatacacagaggaccaacctgtttgcctggacacctgcgtgtcctcccctggatggcagaagcctttgatggctctccaggtgctgctaccattgtgcaggtggtgacatcccaccccaatctcacgccagatccagtctgtgcccatcctaacagctctgtgttaaagtcatgtcggagccaccctcctggtccacaactgccctgttctccagtgattgccacagcccccttccccaccccggtccctagcctcccctccagccctgccccagcctgtcacaacacagcagcacagggctgcttctaaacctgttggattacccccacccgctcagaacccccaagagctccccaatgtccttcttgctcagagcacaagcccgggtgattgggtgaccaggacccagctcaccacccccgcctcataccccaccccacccatgccccacatccttccccaccccacatcccacccgtggtagcctcgtccacgccagtgcctgctcagctgtagcgaggctggcttctgctgtacctgctgccccagggcccttgcacccgctgttcccactgcctgaaccttctgcccctgtgtctccaaggcttgctctgtcactttctttgagtctccaccccaatatccctggctcaggaagccttccctgacccttccttatgaaagagccacatggccgtcggcagcaggcacccagacgccatcctgacactggatctcgagagctcaagcttactagtgtggataaccgtattaccgccatgcat

SEQ ID NO: 43325 - DNA, 5399 bp, ARTIFICIAL SEQUENCE
  vector containing human replication origin
tagttattaatagtaatcaattacggggtcattagttcatagcccatatatggagttccgcgttacataacttacggtaaatggcccgcctggctgaccgcccaacgacccccgcccattgacgtcaataatgacgtatgttcccatagtaacgccaatagggactttccattgacgtcaatgggtggagtatttacggtaaactgcccacttggcagtacatcaagtgtatcatatgccaagtacgccccctattgacgtcaatgacggtaaatggcccgcctggcattatgcccagtacatgaccttatgggactttcctacttggcagtacatctacgtattagtcatcgctattaccatggtgatgcggttttggcagtacatcaatgggcgtggatagcggtttgactcacggggatttccaagtctccaccccattgacgtcaatgggagtttgttttggcaccaaaatcaacgggactttccaaaatgtcgtaacaactccgccccattgacgcaaatgggcggtaggcgtgtacggtgggaggtctatataagcagagctggtttagtgaaccgtcagatccgctagagcatgaccgagtacaagcccacggtgcgcctcgccacccgcgacgacgtcccccgggccgtacgcaccctcgccgccgcgttcgccgactaccccgccacgcgccacaccgtcgacccggaccgccacatcgagcgggtcaccgagctgcaagaactcttcctcacgcgcgtcgggctcgacatcggcaaggtgtgggtcgcggacgacggcgccgcggtggcggtctggaccacgccggagagcgtcgaagcgggggcggtgttcgccgagatcggcccgcgcatggccgagttgagcggttcccggctggccgcgcagcaacagatggaaggcctcctggcgccgcaccggcccaaggagcccgcgtggttcctggccaccgtcggcgtctcgcccgaccaccagggcaagggtctgggcagcgccgtcgtgctccccggagtggaggcggccgagcgcgccggggtgcccgccttcctggagacctccgcgccccgcaacctccccttctacgagcggctcggcttcaccgtcaccgccgacgtcgaggtgcccgaaggaccgcgcacctggtgcatgacccgcaagcccggtgcctagctgattggtctaaaatgagatacatcaacgctcctccatgttttttgttttctttttaaatgaaaaactttattttttaagaggagtttcaggttcatagcaaaattgagaggaaggtacattcaagctgaggaagttttcctctattcctagtttactgagagattgcatcatgaatgggtgttaaattttgtcaaatgctttttctgtgtctatcaatatgaccatgtgattttcttctttaacctgttgatgggacaaattacgttaattgattttcaaacgttgaaccacccttacatatctggaataaattctacttggttgtggtgtatattttttgatacattcttggattctttttgctaatattttgttgaaaatgtttgtatctttgttcatgagagatattggtctgttgttttcttttcttgtaatgtcattttctagttccggtattaaggtaatgctggcctagttgaatgatttaggaagtattccctctgcttctgtcttctgaaagagattgtagaaagttgatacaatttttttttctttaaatatttgatagaattctgcagtgaattctgcagtcgacggtaccgcgggcccgggatccaccggatctagataactgatcataatcagccataccacatttgtagaggttttacttgctttaaaaaacctcccacacctccccctgaacctgaaacataaaatgaatgcaattgttgttgttaacttgtttattgcagcttataatggttacaaataaagcaatagcatcacaaatttcacaaataaagcatttttttcactgcattctagttgtggtttgtccaaactcatcaatgtatcttaacgcgtaaattgtaagcgttaatattttgttaaaattcgcgttaaatttttgttaaatcagctcattttttaaccaataggccgaaatcggcgcggaacccctatttgtttatttttctaaatacattcaaatatgtatccgctcatgagacaataaccctgataaatgcttcaataatattgaaaaaggaagagtcaggatgaggatcgtttcgcatgattgaacaagatggattgcacgcaggttctccggccgcttgggtggagaggctattcggctatgactgggcacaacagacaatcggctgctctgatgccgccgtgttccggctgtcagcgcaggggcgcccggttctttttgtcaagaccgacctgtccggtgccctgaatgaactgcaagacgaggcagcgcggctatcgtggctggccacgacgggcgttccttgcgcagctgtgctcgacgttgtcactgaagcgggaagggactggctgctattgggcgaagtgccggggcaggatctcctgtcatctcaccttgctcctgccgagaaagtatccatcatggctgatgcaatgcggcggctgcatacgcttgatccggctacctgcccattcgaccaccaagcgaaacatcgcatcgagcgagcacgtactcggatggaagccggtcttgtcgatcaggatgatctggacgaagagcatcaggggctcgcgccagccgaactgttcgccaggctcaaggcgagcatgcccgacggcgaggatctcgtcgtgacccatggcgatgcctgcttgccgaatatcatggtggaaaatggccgcttttctggattcatcgactgtggccggctgggtgtggcggaccgctatcaggacatagcgttggctacccgtgatattgctgaagagcttggcggcgaatgggctgaccgcttcctcgtgctttacggtatcgccgctcccgattcgcagcgcatcgccttctatcgccttcttgacgagttcttctgagcgggactctggggttcgaaatgaccgaccaagcgacgcccaacctgccatcacgagatttcgattccaccgccgccttctatgaaaggttgggcttcggaatcgttttccgggacgccggctggatgatcctccagcgcggggatctcatgctggagttcttcgcccaccctagggggaggctaactgaaacacggaaggagacaataccggaaggaacccgcgctatgacggcaataaaaagacagaataaaacgcacggtgttgggtcgtttgttcataaacgcggggttcggtcccagggctggcactctgtcgataccccaccgagaccccattggggccaatacgcccgcgtttcttccttttccccaccccaccccccaagttcgggtgaaggcccagggctcgcagccaacgtcggggcggcaggccctgccatagcctcaggttactcatatatactttagattgatttaaaacttcatttttaatttaaaaggatctaggtgaagatcctttttgataatctcatgaccaaaatcccttaacgtgagttttcgttccactgagcgtcagaccccgtagaaaagatcaaaggatcttcttgagatcctttttttctgcgcgtaatctgctgcttgcaaacaaaaaaaccaccgctaccagcggtggtttgtttgccggatcaagagctaccaactctttttccgaaggtaactggcttcagcagagcgcagataccaaatactgtccttctagtgtagccgtagttaggccaccacttcaagaactctgtagcaccgcctacatacctcgctctgctaatcctgttaccagtggctgctgccagtggcgataagtcgtgtcttaccgggttggactcaagacgatagttaccggataaggcgcagcggtcgggctgaacggggggttcgtgcacacagcccagcttggagcgaacgacctacaccgaactgagatacctacagcgtgagctatgagaaagcgccacgcttcccgaagggagaaaggcggacaggtatccggtaagcggcagggtcggaacaggagagcgcacgagggagcttccagggggaaacgcctggtatctttatagtcctgtcgggtttcgccacctctgacttgagcgtcgatttttgtgatgctcgtcaggggggcggagcctatggaaaaacgccagcaacgcggcctttttacggttcctggccttttgctggccttttgctcacatgttctttcctgcgttatcccctgattctgctagcttaagcggccgcgatccttcgcgattcaaggctcttgggtttcccgctttggccgcctcgccaaacccaagtcttacactcttagtgaccccctcctttcctccttcccccttaggtcagcagggtttactcattccaattgcaatgctccatgttgccggagtagctcctcgctagaagagagattagttatgtcaccgtcggctcctcccattggtccgggcgtgtggagcgcggcgccatgacgtcagacgcccaaatgagtggggcggtgaggggaaggaggagggaagtaggacttcaacatggcggctgcggcactggcggtggctacggtgacggcctggcccggagcgggcagagttggaggtggtggcgttcgctctccctaggggctgtcgggagctcagcggggaccgagcctgggaggccggccggtgccagcacctttcggcttctgagacggcggcagcagcggcattcaggtgaggggggcctccctctgggggagggggaagaggggcggagttgggggaggggggctggtactgggagactgggaaacgggatggggggccgagcgaggtgaagggcgccggagctaggaggtgggagggaaaagtggccggagatccgcgattcggggaggattctgggagaagggtcggagtgaggggaccggagttgaaggggcggaggggaagtgggatgcggaaaaatgagttcggattaaggagactaataccctactggaagacaggcatagtagacatctatcgggctggactgagaactcggtgggaactagaggatgtcagggagggggacccagattttagtaaagaaggtgagtggtggggagttgagggtgagctggggacgtgcggtgtagatttagttctccctgaggcaatgagattggggagaaaaggtggagactagaccagaggtgagtgatctttggggatatctttggccttgtctgatctcgagagctcaagcttactagtgtggataaccgtattaccgccatgcat

SEQ ID NO: 43326 - DNA, 5429 bp, ARTIFICIAL SEQUENCE
  vector containing human replication origin
tagttattaatagtaatcaattacggggtcattagttcatagcccatatatggagttccgcgttacataacttacggtaaatggcccgcctggctgaccgcccaacgacccccgcccattgacgtcaataatgacgtatgttcccatagtaacgccaatagggactttccattgacgtcaatgggtggagtatttacggtaaactgcccacttggcagtacatcaagtgtatcatatgccaagtacgccccctattgacgtcaatgacggtaaatggcccgcctggcattatgcccagtacatgaccttatgggactttcctacttggcagtacatctacgtattagtcatcgctattaccatggtgatgcggttttggcagtacatcaatgggcgtggatagcggtttgactcacggggatttccaagtctccaccccattgacgtcaatgggagtttgttttggcaccaaaatcaacgggactttccaaaatgtcgtaacaactccgccccattgacgcaaatgggcggtaggcgtgtacggtgggaggtctatataagcagagctggtttagtgaaccgtcagatccgctagagcatgaccgagtacaagcccacggtgcgcctcgccacccgcgacgacgtcccccgggccgtacgcaccctcgccgccgcgttcgccgactaccccgccacgcgccacaccgtcgacccggaccgccacatcgagcgggtcaccgagctgcaagaactcttcctcacgcgcgtcgggctcgacatcggcaaggtgtgggtcgcggacgacggcgccgcggtggcggtctggaccacgccggagagcgtcgaagcgggggcggtgttcgccgagatcggcccgcgcatggccgagttgagcggttcccggctggccgcgcagcaacagatggaaggcctcctggcgccgcaccggcccaaggagcccgcgtggttcctggccaccgtcggcgtctcgcccgaccaccagggcaagggtctgggcagcgccgtcgtgctccccggagtggaggcggccgagcgcgccggggtgcccgccttcctggagacctccgcgccccgcaacctccccttctacgagcggctcggcttcaccgtcaccgccgacgtcgaggtgcccgaaggaccgcgcacctggtgcatgacccgcaagcccggtgcctagctgattggtctaaaatgagatacatcaacgctcctccatgttttttgttttctttttaaatgaaaaactttattttttaagaggagtttcaggttcatagcaaaattgagaggaaggtacattcaagctgaggaagttttcctctattcctagtttactgagagattgcatcatgaatgggtgttaaattttgtcaaatgctttttctgtgtctatcaatatgaccatgtgattttcttctttaacctgttgatgggacaaattacgttaattgattttcaaacgttgaaccacccttacatatctggaataaattctacttggttgtggtgtatattttttgatacattcttggattctttttgctaatattttgttgaaaatgtttgtatctttgttcatgagagatattggtctgttgttttcttttcttgtaatgtcattttctagttccggtattaaggtaatgctggcctagttgaatgatttaggaagtattccctctgcttctgtcttctgaaagagattgtagaaagttgatacaatttttttttctttaaatatttgatagaattctgcagtgaattctgcagtcgacggtaccgcgggcccgggatccaccggatctagataactgatcataatcagccataccacatttgtagaggttttacttgctttaaaaaacctcccacacctccccctgaacctgaaacataaaatgaatgcaattgttgttgttaacttgtttattgcagcttataatggttacaaataaagcaatagcatcacaaatttcacaaataaagcatttttttcactgcattctagttgtggtttgtccaaactcatcaatgtatcttaacgcgtaaattgtaagcgttaatattttgttaaaattcgcgttaaatttttgttaaatcagctcattttttaaccaataggccgaaatcggcgcggaacccctatttgtttatttttctaaatacattcaaatatgtatccgctcatgagacaataaccctgataaatgcttcaataatattgaaaaaggaagagtcaggatgaggatcgtttcgcatgattgaacaagatggattgcacgcaggttctccggccgcttgggtggagaggctattcggctatgactgggcacaacagacaatcggctgctctgatgccgccgtgttccggctgtcagcgcaggggcgcccggttctttttgtcaagaccgacctgtccggtgccctgaatgaactgcaagacgaggcagcgcggctatcgtggctggccacgacgggcgttccttgcgcagctgtgctcgacgttgtcactgaagcgggaagggactggctgctattgggcgaagtgccggggcaggatctcctgtcatctcaccttgctcctgccgagaaagtatccatcatggctgatgcaatgcggcggctgcatacgcttgatccggctacctgcccattcgaccaccaagcgaaacatcgcatcgagcgagcacgtactcggatggaagccggtcttgtcgatcaggatgatctggacgaagagcatcaggggctcgcgccagccgaactgttcgccaggctcaaggcgagcatgcccgacggcgaggatctcgtcgtgacccatggcgatgcctgcttgccgaatatcatggtggaaaatggccgcttttctggattcatcgactgtggccggctgggtgtggcggaccgctatcaggacatagcgttggctacccgtgatattgctgaagagcttggcggcgaatgggctgaccgcttcctcgtgctttacggtatcgccgctcccgattcgcagcgcatcgccttctatcgccttcttgacgagttcttctgagcgggactctggggttcgaaatgaccgaccaagcgacgcccaacctgccatcacgagatttcgattccaccgccgccttctatgaaaggttgggcttcggaatcgttttccgggacgccggctggatgatcctccagcgcggggatctcatgctggagttcttcgcccaccctagggggaggctaactgaaacacggaaggagacaataccggaaggaacccgcgctatgacggcaataaaaagacagaataaaacgcacggtgttgggtcgtttgttcataaacgcggggttcggtcccagggctggcactctgtcgataccccaccgagaccccattggggccaatacgcccgcgtttcttccttttccccaccccaccccccaagttcgggtgaaggcccagggctcgcagccaacgtcggggcggcaggccctgccatagcctcaggttactcatatatactttagattgatttaaaacttcatttttaatttaaaaggatctaggtgaagatcctttttgataatctcatgaccaaaatcccttaacgtgagttttcgttccactgagcgtcagaccccgtagaaaagatcaaaggatcttcttgagatcctttttttctgcgcgtaatctgctgcttgcaaacaaaaaaaccaccgctaccagcggtggtttgtttgccggatcaagagctaccaactctttttccgaaggtaactggcttcagcagagcgcagataccaaatactgtccttctagtgtagccgtagttaggccaccacttcaagaactctgtagcaccgcctacatacctcgctctgctaatcctgttaccagtggctgctgccagtggcgataagtcgtgtcttaccgggttggactcaagacgatagttaccggataaggcgcagcggtcgggctgaacggggggttcgtgcacacagcccagcttggagcgaacgacctacaccgaactgagatacctacagcgtgagctatgagaaagcgccacgcttcccgaagggagaaaggcggacaggtatccggtaagcggcagggtcggaacaggagagcgcacgagggagcttccagggggaaacgcctggtatctttatagtcctgtcgggtttcgccacctctgacttgagcgtcgatttttgtgatgctcgtcaggggggcggagcctatggaaaaacgccagcaacgcggcctttttacggttcctggccttttgctggccttttgctcacatgttctttcctgcgttatcccctgattctgctagcttaagcggccgcgatgttaaaagctgagcagacaggagtgcaatagattggcctcttcaccccactaaccccaacacccttgctcttagaacccagaacacaagtgtcttcctgtagttactacaatgccctaaactgttactttgtcaaagtactgggggttctgttctcctgcctcaagttgggcctacaaccccttcccctagatagtgcccgcagaccctccgacaccgctacactccttctccattaaacagccccccttccttcaaagcacctccatgtcccctgcccctcatgtacctcctccaaccccccacatcagacagagacagccccctcacaatgtacctcgcaacccccccacaacaaagcgctcccgcccttcccccatagaggcctctggagaatgcaccttgttgcccacacattgagtccccaactgctcccgcgacttcgtatcttccctcaacacacagcagtctccagatcgtctgcaaagcgcacccccatccgcgtcccttcttccacgctcaccctgccccacacctgtagttccgtgggtcccgttgcacttggggacgtggtagtggttggggcagttactgagcagccctagctgtagcctccgcctgcaaacctcgccccttcagtctgagccccgcccccgcaacgcccgggcccaccctctcccttgtcccaccttccaccttctgtggacttgtccctttcctcgtttaatttctcgagctcctcccctgtagcccgggccccgcccccttctgacctcgcacctccttcgcgttttctttgcatttccccaggatcctcagcttttcccaggccccacccccgatccccgcctcctctcggtctctccgcctttcaccaggacccgccccctcggattccagcctggcagaagtcgcgccaagacccttccaccacgatccccctcccatctcagagcccctcctccttccgccccttctccctcacgcctcacccgggcggtatctcgagagctcaagcttactagtgtggataaccgtattaccgccatgcat

SEQ ID NO: 43327 - DNA, 5329 bp, ARTIFICIAL SEQUENCE
  vector containing human replication origin
tagttattaatagtaatcaattacggggtcattagttcatagcccatatatggagttccgcgttacataacttacggtaaatggcccgcctggctgaccgcccaacgacccccgcccattgacgtcaataatgacgtatgttcccatagtaacgccaatagggactttccattgacgtcaatgggtggagtatttacggtaaactgcccacttggcagtacatcaagtgtatcatatgccaagtacgccccctattgacgtcaatgacggtaaatggcccgcctggcattatgcccagtacatgaccttatgggactttcctacttggcagtacatctacgtattagtcatcgctattaccatggtgatgcggttttggcagtacatcaatgggcgtggatagcggtttgactcacggggatttccaagtctccaccccattgacgtcaatgggagtttgttttggcaccaaaatcaacgggactttccaaaatgtcgtaacaactccgccccattgacgcaaatgggcggtaggcgtgtacggtgggaggtctatataagcagagctggtttagtgaaccgtcagatccgctagagcatgaccgagtacaagcccacggtgcgcctcgccacccgcgacgacgtcccccgggccgtacgcaccctcgccgccgcgttcgccgactaccccgccacgcgccacaccgtcgacccggaccgccacatcgagcgggtcaccgagctgcaagaactcttcctcacgcgcgtcgggctcgacatcggcaaggtgtgggtcgcggacgacggcgccgcggtggcggtctggaccacgccggagagcgtcgaagcgggggcggtgttcgccgagatcggcccgcgcatggccgagttgagcggttcccggctggccgcgcagcaacagatggaaggcctcctggcgccgcaccggcccaaggagcccgcgtggttcctggccaccgtcggcgtctcgcccgaccaccagggcaagggtctgggcagcgccgtcgtgctccccggagtggaggcggccgagcgcgccggggtgcccgccttcctggagacctccgcgccccgcaacctccccttctacgagcggctcggcttcaccgtcaccgccgacgtcgaggtgcccgaaggaccgcgcacctggtgcatgacccgcaagcccggtgcctagctgattggtctaaaatgagatacatcaacgctcctccatgttttttgttttctttttaaatgaaaaactttattttttaagaggagtttcaggttcatagcaaaattgagaggaaggtacattcaagctgaggaagttttcctctattcctagtttactgagagattgcatcatgaatgggtgttaaattttgtcaaatgctttttctgtgtctatcaatatgaccatgtgattttcttctttaacctgttgatgggacaaattacgttaattgattttcaaacgttgaaccacccttacatatctggaataaattctacttggttgtggtgtatattttttgatacattcttggattctttttgctaatattttgttgaaaatgtttgtatctttgttcatgagagatattggtctgttgttttcttttcttgtaatgtcattttctagttccggtattaaggtaatgctggcctagttgaatgatttaggaagtattccctctgcttctgtcttctgaaagagattgtagaaagttgatacaatttttttttctttaaatatttgatagaattctgcagtgaattctgcagtcgacggtaccgcgggcccgggatccaccggatctagataactgatcataatcagccataccacatttgtagaggttttacttgctttaaaaaacctcccacacctccccctgaacctgaaacataaaatgaatgcaattgttgttgttaacttgtttattgcagcttataatggttacaaataaagcaatagcatcacaaatttcacaaataaagcatttttttcactgcattctagttgtggtttgtccaaactcatcaatgtatcttaacgcgtaaattgtaagcgttaatattttgttaaaattcgcgttaaatttttgttaaatcagctcattttttaaccaataggccgaaatcggcgcggaacccctatttgtttatttttctaaatacattcaaatatgtatccgctcatgagacaataaccctgataaatgcttcaataatattgaaaaaggaagagtcaggatgaggatcgtttcgcatgattgaacaagatggattgcacgcaggttctccggccgcttgggtggagaggctattcggctatgactgggcacaacagacaatcggctgctctgatgccgccgtgttccggctgtcagcgcaggggcgcccggttctttttgtcaagaccgacctgtccggtgccctgaatgaactgcaagacgaggcagcgcggctatcgtggctggccacgacgggcgttccttgcgcagctgtgctcgacgttgtcactgaagcgggaagggactggctgctattgggcgaagtgccggggcaggatctcctgtcatctcaccttgctcctgccgagaaagtatccatcatggctgatgcaatgcggcggctgcatacgcttgatccggctacctgcccattcgaccaccaagcgaaacatcgcatcgagcgagcacgtactcggatggaagccggtcttgtcgatcaggatgatctggacgaagagcatcaggggctcgcgccagccgaactgttcgccaggctcaaggcgagcatgcccgacggcgaggatctcgtcgtgacccatggcgatgcctgcttgccgaatatcatggtggaaaatggccgcttttctggattcatcgactgtggccggctgggtgtggcggaccgctatcaggacatagcgttggctacccgtgatattgctgaagagcttggcggcgaatgggctgaccgcttcctcgtgctttacggtatcgccgctcccgattcgcagcgcatcgccttctatcgccttcttgacgagttcttctgagcgggactctggggttcgaaatgaccgaccaagcgacgcccaacctgccatcacgagatttcgattccaccgccgccttctatgaaaggttgggcttcggaatcgttttccgggacgccggctggatgatcctccagcgcggggatctcatgctggagttcttcgcccaccctagggggaggctaactgaaacacggaaggagacaataccggaaggaacccgcgctatgacggcaataaaaagacagaataaaacgcacggtgttgggtcgtttgttcataaacgcggggttcggtcccagggctggcactctgtcgataccccaccgagaccccattggggccaatacgcccgcgtttcttccttttccccaccccaccccccaagttcgggtgaaggcccagggctcgcagccaacgtcggggcggcaggccctgccatagcctcaggttactcatatatactttagattgatttaaaacttcatttttaatttaaaaggatctaggtgaagatcctttttgataatctcatgaccaaaatcccttaacgtgagttttcgttccactgagcgtcagaccccgtagaaaagatcaaaggatcttcttgagatcctttttttctgcgcgtaatctgctgcttgcaaacaaaaaaaccaccgctaccagcggtggtttgtttgccggatcaagagctaccaactctttttccgaaggtaactggcttcagcagagcgcagataccaaatactgtccttctagtgtagccgtagttaggccaccacttcaagaactctgtagcaccgcctacatacctcgctctgctaatcctgttaccagtggctgctgccagtggcgataagtcgtgtcttaccgggttggactcaagacgatagttaccggataaggcgcagcggtcgggctgaacggggggttcgtgcacacagcccagcttggagcgaacgacctacaccgaactgagatacctacagcgtgagctatgagaaagcgccacgcttcccgaagggagaaaggcggacaggtatccggtaagcggcagggtcggaacaggagagcgcacgagggagcttccagggggaaacgcctggtatctttatagtcctgtcgggtttcgccacctctgacttgagcgtcgatttttgtgatgctcgtcaggggggcggagcctatggaaaaacgccagcaacgcggcctttttacggttcctggccttttgctggccttttgctcacatgttctttcctgcgttatcccctgattctgctagcttaagcggccgcgatctcccgctccgagagtcaccgcggtggggagggagggaggcgccaggccgccgggggagggaccggcggagggggcggcatctggctccgcgcgggctgctgaggcgcggcggcggcaacgccccggagggaggcgggcgcgtggggccgggcgccggggcggggcctgcgggcggggcggggcccggggccgcgaattggttaactcagcctgtgggcggggctgcgcggtgcggggcggggccttgtggcgcatgtgaacgctcattgggccctcctggaagggggcgagaccagcgacatagggacggggccatgcggtgggcgggtggaacacggcgccggtagtgagtggccgagtccgcgctgagagcaaaggggaggagcgggccgggggtgagcagggaaggcgggttgggcgcgaggaggaggcggtggcctggaggaggagccgggtaaggctgaagctggcgctgcggtaaagccactctgcgtgtccctatctgctccaggagcacagtgttccggaaaaataatggcctctcccacacaccggtctgtgtttaaaaacgggagcaacaagacggggcagaatccttggtgaggccagtttacccagaaccccggaaaattctgaaatggacgaggttgcagaacatttagaggcgtggtcttcctgcgtcgttgagctgggaacgttgctacctctgagcttggggcctaacctgggattaacctagcccagagagcccagggatgggcctccgtaggtccattaaactcagaaggtcgtgtgtactggtagtgagtggatttttcgggggaagggtgcccatgattaaaatgtttctacagaaagtctggctgtatttggagagggtacagggagaagcagcccatatctcgagagctcaagcttactagtgtggataaccgtattaccgccatgcat

SEQ ID NO: 43328 - DNA, 5339 bp, ARTIFICIAL SEQUENCE
  vector containing human replication origin
tagttattaatagtaatcaattacggggtcattagttcatagcccatatatggagttccgcgttacataacttacggtaaatggcccgcctggctgaccgcccaacgacccccgcccattgacgtcaataatgacgtatgttcccatagtaacgccaatagggactttccattgacgtcaatgggtggagtatttacggtaaactgcccacttggcagtacatcaagtgtatcatatgccaagtacgccccctattgacgtcaatgacggtaaatggcccgcctggcattatgcccagtacatgaccttatgggactttcctacttggcagtacatctacgtattagtcatcgctattaccatggtgatgcggttttggcagtacatcaatgggcgtggatagcggtttgactcacggggatttccaagtctccaccccattgacgtcaatgggagtttgttttggcaccaaaatcaacgggactttccaaaatgtcgtaacaactccgccccattgacgcaaatgggcggtaggcgtgtacggtgggaggtctatataagcagagctggtttagtgaaccgtcagatccgctagagcatgaccgagtacaagcccacggtgcgcctcgccacccgcgacgacgtcccccgggccgtacgcaccctcgccgccgcgttcgccgactaccccgccacgcgccacaccgtcgacccggaccgccacatcgagcgggtcaccgagctgcaagaactcttcctcacgcgcgtcgggctcgacatcggcaaggtgtgggtcgcggacgacggcgccgcggtggcggtctggaccacgccggagagcgtcgaagcgggggcggtgttcgccgagatcggcccgcgcatggccgagttgagcggttcccggctggccgcgcagcaacagatggaaggcctcctggcgccgcaccggcccaaggagcccgcgtggttcctggccaccgtcggcgtctcgcccgaccaccagggcaagggtctgggcagcgccgtcgtgctccccggagtggaggcggccgagcgcgccggggtgcccgccttcctggagacctccgcgccccgcaacctccccttctacgagcggctcggcttcaccgtcaccgccgacgtcgaggtgcccgaaggaccgcgcacctggtgcatgacccgcaagcccggtgcctagctgattggtctaaaatgagatacatcaacgctcctccatgttttttgttttctttttaaatgaaaaactttattttttaagaggagtttcaggttcatagcaaaattgagaggaaggtacattcaagctgaggaagttttcctctattcctagtttactgagagattgcatcatgaatgggtgttaaattttgtcaaatgctttttctgtgtctatcaatatgaccatgtgattttcttctttaacctgttgatgggacaaattacgttaattgattttcaaacgttgaaccacccttacatatctggaataaattctacttggttgtggtgtatattttttgatacattcttggattctttttgctaatattttgttgaaaatgtttgtatctttgttcatgagagatattggtctgttgttttcttttcttgtaatgtcattttctagttccggtattaaggtaatgctggcctagttgaatgatttaggaagtattccctctgcttctgtcttctgaaagagattgtagaaagttgatacaatttttttttctttaaatatttgatagaattctgcagtgaattctgcagtcgacggtaccgcgggcccgggatccaccggatctagataactgatcataatcagccataccacatttgtagaggttttacttgctttaaaaaacctcccacacctccccctgaacctgaaacataaaatgaatgcaattgttgttgttaacttgtttattgcagcttataatggttacaaataaagcaatagcatcacaaatttcacaaataaagcatttttttcactgcattctagttgtggtttgtccaaactcatcaatgtatcttaacgcgtaaattgtaagcgttaatattttgttaaaattcgcgttaaatttttgttaaatcagctcattttttaaccaataggccgaaatcggcgcggaacccctatttgtttatttttctaaatacattcaaatatgtatccgctcatgagacaataaccctgataaatgcttcaataatattgaaaaaggaagagtcaggatgaggatcgtttcgcatgattgaacaagatggattgcacgcaggttctccggccgcttgggtggagaggctattcggctatgactgggcacaacagacaatcggctgctctgatgccgccgtgttccggctgtcagcgcaggggcgcccggttctttttgtcaagaccgacctgtccggtgccctgaatgaactgcaagacgaggcagcgcggctatcgtggctggccacgacgggcgttccttgcgcagctgtgctcgacgttgtcactgaagcgggaagggactggctgctattgggcgaagtgccggggcaggatctcctgtcatctcaccttgctcctgccgagaaagtatccatcatggctgatgcaatgcggcggctgcatacgcttgatccggctacctgcccattcgaccaccaagcgaaacatcgcatcgagcgagcacgtactcggatggaagccggtcttgtcgatcaggatgatctggacgaagagcatcaggggctcgcgccagccgaactgttcgccaggctcaaggcgagcatgcccgacggcgaggatctcgtcgtgacccatggcgatgcctgcttgccgaatatcatggtggaaaatggccgcttttctggattcatcgactgtggccggctgggtgtggcggaccgctatcaggacatagcgttggctacccgtgatattgctgaagagcttggcggcgaatgggctgaccgcttcctcgtgctttacggtatcgccgctcccgattcgcagcgcatcgccttctatcgccttcttgacgagttcttctgagcgggactctggggttcgaaatgaccgaccaagcgacgcccaacctgccatcacgagatttcgattccaccgccgccttctatgaaaggttgggcttcggaatcgttttccgggacgccggctggatgatcctccagcgcggggatctcatgctggagttcttcgcccaccctagggggaggctaactgaaacacggaaggagacaataccggaaggaacccgcgctatgacggcaataaaaagacagaataaaacgcacggtgttgggtcgtttgttcataaacgcggggttcggtcccagggctggcactctgtcgataccccaccgagaccccattggggccaatacgcccgcgtttcttccttttccccaccccaccccccaagttcgggtgaaggcccagggctcgcagccaacgtcggggcggcaggccctgccatagcctcaggttactcatatatactttagattgatttaaaacttcatttttaatttaaaaggatctaggtgaagatcctttttgataatctcatgaccaaaatcccttaacgtgagttttcgttccactgagcgtcagaccccgtagaaaagatcaaaggatcttcttgagatcctttttttctgcgcgtaatctgctgcttgcaaacaaaaaaaccaccgctaccagcggtggtttgtttgccggatcaagagctaccaactctttttccgaaggtaactggcttcagcagagcgcagataccaaatactgtccttctagtgtagccgtagttaggccaccacttcaagaactctgtagcaccgcctacatacctcgctctgctaatcctgttaccagtggctgctgccagtggcgataagtcgtgtcttaccgggttggactcaagacgatagttaccggataaggcgcagcggtcgggctgaacggggggttcgtgcacacagcccagcttggagcgaacgacctacaccgaactgagatacctacagcgtgagctatgagaaagcgccacgcttcccgaagggagaaaggcggacaggtatccggtaagcggcagggtcggaacaggagagcgcacgagggagcttccagggggaaacgcctggtatctttatagtcctgtcgggtttcgccacctctgacttgagcgtcgatttttgtgatgctcgtcaggggggcggagcctatggaaaaacgccagcaacgcggcctttttacggttcctggccttttgctggccttttgctcacatgttctttcctgcgttatcccctgattctgctagcttaagcggccgcgataggaggacaatagcctccccctgccgcaggccgccggctcccgcgggaggcccgggaccatctggagccggcggccccgcggggctctgggcggggcccgagtcgccccttccccgcccagcgccatggcaaccgaggcccctctcggtgctccccgccgctccccgcccggggtagttgacctgcctcggggcgaacgcggcagcagctccgaggccggctgccgacccccagccaccttccgtgcggggtccccccaaaaccccgccttcccgtcctcgctggtccctgggtcccccaccacagcttacaggtcttgatctccccggttcggacacctcacctttgtccctattctgcttttcctccaaaatccgtatccccgagacacgcgatccttcctctaatgacactgccgacgaggtttcccgagatccagcctccgttcccctttcctctccgggcacctccagtccgtctccgctaagcattcctctcacccgtcccctcgctctcgcgtcctccttcaggcagctgggccggctctccctcccagaacatctccatggcacagtgaagattcgtcttctacagatcagatgctccaaacaggcatctcagcgcttctcagctcctctcatttatcaaccaggagaattccggcctagtcaccgtcttgaggggggtgggggtgggggcagacatttctaggcctgacacggctgggtttctccttggtttgttagcgtctgagtggtctaaggtccaaggtccttaaccaaggtgaactgctgcctgcttaggagaggaaggaattatgcccaaatcatgacaaactcacagagtgccaggtgggtgctaaaagcgcatcatctcatgtgacactcccacccccactccagctctgagaatctcgagagctcaagcttactagtgtggataaccgtattaccgccatgcat

SEQ ID NO: 43329 - DNA, 5419 bp, ARTIFICIAL SEQUENCE
  vector containing human replication origin
tagttattaatagtaatcaattacggggtcattagttcatagcccatatatggagttccgcgttacataacttacggtaaatggcccgcctggctgaccgcccaacgacccccgcccattgacgtcaataatgacgtatgttcccatagtaacgccaatagggactttccattgacgtcaatgggtggagtatttacggtaaactgcccacttggcagtacatcaagtgtatcatatgccaagtacgccccctattgacgtcaatgacggtaaatggcccgcctggcattatgcccagtacatgaccttatgggactttcctacttggcagtacatctacgtattagtcatcgctattaccatggtgatgcggttttggcagtacatcaatgggcgtggatagcggtttgactcacggggatttccaagtctccaccccattgacgtcaatgggagtttgttttggcaccaaaatcaacgggactttccaaaatgtcgtaacaactccgccccattgacgcaaatgggcggtaggcgtgtacggtgggaggtctatataagcagagctggtttagtgaaccgtcagatccgctagagcatgaccgagtacaagcccacggtgcgcctcgccacccgcgacgacgtcccccgggccgtacgcaccctcgccgccgcgttcgccgactaccccgccacgcgccacaccgtcgacccggaccgccacatcgagcgggtcaccgagctgcaagaactcttcctcacgcgcgtcgggctcgacatcggcaaggtgtgggtcgcggacgacggcgccgcggtggcggtctggaccacgccggagagcgtcgaagcgggggcggtgttcgccgagatcggcccgcgcatggccgagttgagcggttcccggctggccgcgcagcaacagatggaaggcctcctggcgccgcaccggcccaaggagcccgcgtggttcctggccaccgtcggcgtctcgcccgaccaccagggcaagggtctgggcagcgccgtcgtgctccccggagtggaggcggccgagcgcgccggggtgcccgccttcctggagacctccgcgccccgcaacctccccttctacgagcggctcggcttcaccgtcaccgccgacgtcgaggtgcccgaaggaccgcgcacctggtgcatgacccgcaagcccggtgcctagctgattggtctaaaatgagatacatcaacgctcctccatgttttttgttttctttttaaatgaaaaactttattttttaagaggagtttcaggttcatagcaaaattgagaggaaggtacattcaagctgaggaagttttcctctattcctagtttactgagagattgcatcatgaatgggtgttaaattttgtcaaatgctttttctgtgtctatcaatatgaccatgtgattttcttctttaacctgttgatgggacaaattacgttaattgattttcaaacgttgaaccacccttacatatctggaataaattctacttggttgtggtgtatattttttgatacattcttggattctttttgctaatattttgttgaaaatgtttgtatctttgttcatgagagatattggtctgttgttttcttttcttgtaatgtcattttctagttccggtattaaggtaatgctggcctagttgaatgatttaggaagtattccctctgcttctgtcttctgaaagagattgtagaaagttgatacaatttttttttctttaaatatttgatagaattctgcagtgaattctgcagtcgacggtaccgcgggcccgggatccaccggatctagataactgatcataatcagccataccacatttgtagaggttttacttgctttaaaaaacctcccacacctccccctgaacctgaaacataaaatgaatgcaattgttgttgttaacttgtttattgcagcttataatggttacaaataaagcaatagcatcacaaatttcacaaataaagcatttttttcactgcattctagttgtggtttgtccaaactcatcaatgtatcttaacgcgtaaattgtaagcgttaatattttgttaaaattcgcgttaaatttttgttaaatcagctcattttttaaccaataggccgaaatcggcgcggaacccctatttgtttatttttctaaatacattcaaatatgtatccgctcatgagacaataaccctgataaatgcttcaataatattgaaaaaggaagagtcaggatgaggatcgtttcgcatgattgaacaagatggattgcacgcaggttctccggccgcttgggtggagaggctattcggctatgactgggcacaacagacaatcggctgctctgatgccgccgtgttccggctgtcagcgcaggggcgcccggttctttttgtcaagaccgacctgtccggtgccctgaatgaactgcaagacgaggcagcgcggctatcgtggctggccacgacgggcgttccttgcgcagctgtgctcgacgttgtcactgaagcgggaagggactggctgctattgggcgaagtgccggggcaggatctcctgtcatctcaccttgctcctgccgagaaagtatccatcatggctgatgcaatgcggcggctgcatacgcttgatccggctacctgcccattcgaccaccaagcgaaacatcgcatcgagcgagcacgtactcggatggaagccggtcttgtcgatcaggatgatctggacgaagagcatcaggggctcgcgccagccgaactgttcgccaggctcaaggcgagcatgcccgacggcgaggatctcgtcgtgacccatggcgatgcctgcttgccgaatatcatggtggaaaatggccgcttttctggattcatcgactgtggccggctgggtgtggcggaccgctatcaggacatagcgttggctacccgtgatattgctgaagagcttggcggcgaatgggctgaccgcttcctcgtgctttacggtatcgccgctcccgattcgcagcgcatcgccttctatcgccttcttgacgagttcttctgagcgggactctggggttcgaaatgaccgaccaagcgacgcccaacctgccatcacgagatttcgattccaccgccgccttctatgaaaggttgggcttcggaatcgttttccgggacgccggctggatgatcctccagcgcggggatctcatgctggagttcttcgcccaccctagggggaggctaactgaaacacggaaggagacaataccggaaggaacccgcgctatgacggcaataaaaagacagaataaaacgcacggtgttgggtcgtttgttcataaacgcggggttcggtcccagggctggcactctgtcgataccccaccgagaccccattggggccaatacgcccgcgtttcttccttttccccaccccaccccccaagttcgggtgaaggcccagggctcgcagccaacgtcggggcggcaggccctgccatagcctcaggttactcatatatactttagattgatttaaaacttcatttttaatttaaaaggatctaggtgaagatcctttttgataatctcatgaccaaaatcccttaacgtgagttttcgttccactgagcgtcagaccccgtagaaaagatcaaaggatcttcttgagatcctttttttctgcgcgtaatctgctgcttgcaaacaaaaaaaccaccgctaccagcggtggtttgtttgccggatcaagagctaccaactctttttccgaaggtaactggcttcagcagagcgcagataccaaatactgtccttctagtgtagccgtagttaggccaccacttcaagaactctgtagcaccgcctacatacctcgctctgctaatcctgttaccagtggctgctgccagtggcgataagtcgtgtcttaccgggttggactcaagacgatagttaccggataaggcgcagcggtcgggctgaacggggggttcgtgcacacagcccagcttggagcgaacgacctacaccgaactgagatacctacagcgtgagctatgagaaagcgccacgcttcccgaagggagaaaggcggacaggtatccggtaagcggcagggtcggaacaggagagcgcacgagggagcttccagggggaaacgcctggtatctttatagtcctgtcgggtttcgccacctctgacttgagcgtcgatttttgtgatgctcgtcaggggggcggagcctatggaaaaacgccagcaacgcggcctttttacggttcctggccttttgctggccttttgctcacatgttctttcctgcgttatcccctgattctgctagcttaagcggccgcgattctctctgcaaaacggggcgaacctcggcgcggcggccgactcccgagctcccggccgcggctccacttcctcctcttcccctgctccctcgccgctcgctcagcgccgcgccgctgccacctccgctgtcatccccgccacccacccccaccggagccgcagcccgagctcagccgaaacagcgccgcccagcgccccagcgccagcctgcgcggccccgcccggacggggcggagtcagcagagaccccgcccccggccggctgcgggcaggggcggggtgcgcgccctctccccttcccgggcctcgcgcgtggggccgcaggagccaatccgagggtgggagcggagcggcgccctgcggaaagcggattctacctcggagagggcggggcggacaatggagaggtgcggctgcaagaggacaatggcggggctgggggttcggaacgggccgaatcggggagggggttggcctcgggacccggaaggagggagaggcgagagggctggcttgcctgggacgggggcatggggactgctgtgcggggattgcgggggtcacggggaaggagcaggggccagtgtaggaaaagaagccggggcgaggcaaggtggaggatatccggggtcaggggtcccagggacgctggagcgagccctcctgagtggtgggatgccaccgacaccttgcttctccctagcttctagtgctcggcgctcagaggtgagagttgggctgggaagtgttcagatttcaggaaacggtgaaaaataagtttttggaaatgagcgaatttgtcttccacaagcctcccttccctgcgcccatccccgaggaggagcgtcgtggtcaattttaaaaatacgaactcaagagcagagttgtgtgaggacacacacttcgaatcgtgatgcatctgcagtccgctcccgccccttcccaccccgcgcgttgggtgcaggagccgtctttattttctatttcatatctcgagagctcaagcttactagtgtggataaccgtattaccgccatgcat

SEQ ID NO: 43330 - DNA, 5079 bp, ARTIFICIAL SEQUENCE
  vector containing human replication origin
tagttattaatagtaatcaattacggggtcattagttcatagcccatatatggagttccgcgttacataacttacggtaaatggcccgcctggctgaccgcccaacgacccccgcccattgacgtcaataatgacgtatgttcccatagtaacgccaatagggactttccattgacgtcaatgggtggagtatttacggtaaactgcccacttggcagtacatcaagtgtatcatatgccaagtacgccccctattgacgtcaatgacggtaaatggcccgcctggcattatgcccagtacatgaccttatgggactttcctacttggcagtacatctacgtattagtcatcgctattaccatggtgatgcggttttggcagtacatcaatgggcgtggatagcggtttgactcacggggatttccaagtctccaccccattgacgtcaatgggagtttgttttggcaccaaaatcaacgggactttccaaaatgtcgtaacaactccgccccattgacgcaaatgggcggtaggcgtgtacggtgggaggtctatataagcagagctggtttagtgaaccgtcagatccgctagagcatgaccgagtacaagcccacggtgcgcctcgccacccgcgacgacgtcccccgggccgtacgcaccctcgccgccgcgttcgccgactaccccgccacgcgccacaccgtcgacccggaccgccacatcgagcgggtcaccgagctgcaagaactcttcctcacgcgcgtcgggctcgacatcggcaaggtgtgggtcgcggacgacggcgccgcggtggcggtctggaccacgccggagagcgtcgaagcgggggcggtgttcgccgagatcggcccgcgcatggccgagttgagcggttcccggctggccgcgcagcaacagatggaaggcctcctggcgccgcaccggcccaaggagcccgcgtggttcctggccaccgtcggcgtctcgcccgaccaccagggcaagggtctgggcagcgccgtcgtgctccccggagtggaggcggccgagcgcgccggggtgcccgccttcctggagacctccgcgccccgcaacctccccttctacgagcggctcggcttcaccgtcaccgccgacgtcgaggtgcccgaaggaccgcgcacctggtgcatgacccgcaagcccggtgcctagctgattggtctaaaatgagatacatcaacgctcctccatgttttttgttttctttttaaatgaaaaactttattttttaagaggagtttcaggttcatagcaaaattgagaggaaggtacattcaagctgaggaagttttcctctattcctagtttactgagagattgcatcatgaatgggtgttaaattttgtcaaatgctttttctgtgtctatcaatatgaccatgtgattttcttctttaacctgttgatgggacaaattacgttaattgattttcaaacgttgaaccacccttacatatctggaataaattctacttggttgtggtgtatattttttgatacattcttggattctttttgctaatattttgttgaaaatgtttgtatctttgttcatgagagatattggtctgttgttttcttttcttgtaatgtcattttctagttccggtattaaggtaatgctggcctagttgaatgatttaggaagtattccctctgcttctgtcttctgaaagagattgtagaaagttgatacaatttttttttctttaaatatttgatagaattctgcagtgaattctgcagtcgacggtaccgcgggcccgggatccaccggatctagataactgatcataatcagccataccacatttgtagaggttttacttgctttaaaaaacctcccacacctccccctgaacctgaaacataaaatgaatgcaattgttgttgttaacttgtttattgcagcttataatggttacaaataaagcaatagcatcacaaatttcacaaataaagcatttttttcactgcattctagttgtggtttgtccaaactcatcaatgtatcttaacgcgtaaattgtaagcgttaatattttgttaaaattcgcgttaaatttttgttaaatcagctcattttttaaccaataggccgaaatcggcgcggaacccctatttgtttatttttctaaatacattcaaatatgtatccgctcatgagacaataaccctgataaatgcttcaataatattgaaaaaggaagagtcaggatgaggatcgtttcgcatgattgaacaagatggattgcacgcaggttctccggccgcttgggtggagaggctattcggctatgactgggcacaacagacaatcggctgctctgatgccgccgtgttccggctgtcagcgcaggggcgcccggttctttttgtcaagaccgacctgtccggtgccctgaatgaactgcaagacgaggcagcgcggctatcgtggctggccacgacgggcgttccttgcgcagctgtgctcgacgttgtcactgaagcgggaagggactggctgctattgggcgaagtgccggggcaggatctcctgtcatctcaccttgctcctgccgagaaagtatccatcatggctgatgcaatgcggcggctgcatacgcttgatccggctacctgcccattcgaccaccaagcgaaacatcgcatcgagcgagcacgtactcggatggaagccggtcttgtcgatcaggatgatctggacgaagagcatcaggggctcgcgccagccgaactgttcgccaggctcaaggcgagcatgcccgacggcgaggatctcgtcgtgacccatggcgatgcctgcttgccgaatatcatggtggaaaatggccgcttttctggattcatcgactgtggccggctgggtgtggcggaccgctatcaggacatagcgttggctacccgtgatattgctgaagagcttggcggcgaatgggctgaccgcttcctcgtgctttacggtatcgccgctcccgattcgcagcgcatcgccttctatcgccttcttgacgagttcttctgagcgggactctggggttcgaaatgaccgaccaagcgacgcccaacctgccatcacgagatttcgattccaccgccgccttctatgaaaggttgggcttcggaatcgttttccgggacgccggctggatgatcctccagcgcggggatctcatgctggagttcttcgcccaccctagggggaggctaactgaaacacggaaggagacaataccggaaggaacccgcgctatgacggcaataaaaagacagaataaaacgcacggtgttgggtcgtttgttcataaacgcggggttcggtcccagggctggcactctgtcgataccccaccgagaccccattggggccaatacgcccgcgtttcttccttttccccaccccaccccccaagttcgggtgaaggcccagggctcgcagccaacgtcggggcggcaggccctgccatagcctcaggttactcatatatactttagattgatttaaaacttcatttttaatttaaaaggatctaggtgaagatcctttttgataatctcatgaccaaaatcccttaacgtgagttttcgttccactgagcgtcagaccccgtagaaaagatcaaaggatcttcttgagatcctttttttctgcgcgtaatctgctgcttgcaaacaaaaaaaccaccgctaccagcggtggtttgtttgccggatcaagagctaccaactctttttccgaaggtaactggcttcagcagagcgcagataccaaatactgtccttctagtgtagccgtagttaggccaccacttcaagaactctgtagcaccgcctacatacctcgctctgctaatcctgttaccagtggctgctgccagtggcgataagtcgtgtcttaccgggttggactcaagacgatagttaccggataaggcgcagcggtcgggctgaacggggggttcgtgcacacagcccagcttggagcgaacgacctacaccgaactgagatacctacagcgtgagctatgagaaagcgccacgcttcccgaagggagaaaggcggacaggtatccggtaagcggcagggtcggaacaggagagcgcacgagggagcttccagggggaaacgcctggtatctttatagtcctgtcgggtttcgccacctctgacttgagcgtcgatttttgtgatgctcgtcaggggggcggagcctatggaaaaacgccagcaacgcggcctttttacggttcctggccttttgctggccttttgctcacatgttctttcctgcgttatcccctgattctgctagcttaagcggccgcgataaaaggatacccgaaggtcgtatggctctttgtattcgtgtgtgtgcaaaaaggaggactcgcggagcccgagccggcaagccccgcccctccccggacgccctcccggattggccgtccgcggccgcggggcgccccgcccgcaagcacacgcgccgcgcccgaggcgccaaccccggagttgggggcggggggggccctgagggccgccggacccccgacccccaacctcgcctggaccttggcagacccctttcccacctctctccctttcactttctcaccgtcctgtcaccctttcccatctttttttctcagtgaaacaaggcccagtcaccagcataacaatccagtgagcgacctccggacactttgttaaattgagtgaactagtcagtaacattctagactgcaattaaacatcagggacttggtgcgtgggccctactccggtttccaggtgaaatgtctctgggtcacgtgtgttgcttaacacccccacgtttaaatgaacattcacgtatggaacatctttctgaagtcttacacttcagcccgagctcccagtttatctacctggctcagaccacattctcaaaactaaagtggctcctctttatttccaggaagacagctggtatacctggattatctcgagagctcaagcttactagtgtggataaccgtattaccgccatgcat

SEQ ID NO: 43331 - DNA, 5529 bp, ARTIFICIAL SEQUENCE
  vector containing human replication origin
tagttattaatagtaatcaattacggggtcattagttcatagcccatatatggagttccgcgttacataacttacggtaaatggcccgcctggctgaccgcccaacgacccccgcccattgacgtcaataatgacgtatgttcccatagtaacgccaatagggactttccattgacgtcaatgggtggagtatttacggtaaactgcccacttggcagtacatcaagtgtatcatatgccaagtacgccccctattgacgtcaatgacggtaaatggcccgcctggcattatgcccagtacatgaccttatgggactttcctacttggcagtacatctacgtattagtcatcgctattaccatggtgatgcggttttggcagtacatcaatgggcgtggatagcggtttgactcacggggatttccaagtctccaccccattgacgtcaatgggagtttgttttggcaccaaaatcaacgggactttccaaaatgtcgtaacaactccgccccattgacgcaaatgggcggtaggcgtgtacggtgggaggtctatataagcagagctggtttagtgaaccgtcagatccgctagagcatgaccgagtacaagcccacggtgcgcctcgccacccgcgacgacgtcccccgggccgtacgcaccctcgccgccgcgttcgccgactaccccgccacgcgccacaccgtcgacccggaccgccacatcgagcgggtcaccgagctgcaagaactcttcctcacgcgcgtcgggctcgacatcggcaaggtgtgggtcgcggacgacggcgccgcggtggcggtctggaccacgccggagagcgtcgaagcgggggcggtgttcgccgagatcggcccgcgcatggccgagttgagcggttcccggctggccgcgcagcaacagatggaaggcctcctggcgccgcaccggcccaaggagcccgcgtggttcctggccaccgtcggcgtctcgcccgaccaccagggcaagggtctgggcagcgccgtcgtgctccccggagtggaggcggccgagcgcgccggggtgcccgccttcctggagacctccgcgccccgcaacctccccttctacgagcggctcggcttcaccgtcaccgccgacgtcgaggtgcccgaaggaccgcgcacctggtgcatgacccgcaagcccggtgcctagctgattggtctaaaatgagatacatcaacgctcctccatgttttttgttttctttttaaatgaaaaactttattttttaagaggagtttcaggttcatagcaaaattgagaggaaggtacattcaagctgaggaagttttcctctattcctagtttactgagagattgcatcatgaatgggtgttaaattttgtcaaatgctttttctgtgtctatcaatatgaccatgtgattttcttctttaacctgttgatgggacaaattacgttaattgattttcaaacgttgaaccacccttacatatctggaataaattctacttggttgtggtgtatattttttgatacattcttggattctttttgctaatattttgttgaaaatgtttgtatctttgttcatgagagatattggtctgttgttttcttttcttgtaatgtcattttctagttccggtattaaggtaatgctggcctagttgaatgatttaggaagtattccctctgcttctgtcttctgaaagagattgtagaaagttgatacaatttttttttctttaaatatttgatagaattctgcagtgaattctgcagtcgacggtaccgcgggcccgggatccaccggatctagataactgatcataatcagccataccacatttgtagaggttttacttgctttaaaaaacctcccacacctccccctgaacctgaaacataaaatgaatgcaattgttgttgttaacttgtttattgcagcttataatggttacaaataaagcaatagcatcacaaatttcacaaataaagcatttttttcactgcattctagttgtggtttgtccaaactcatcaatgtatcttaacgcgtaaattgtaagcgttaatattttgttaaaattcgcgttaaatttttgttaaatcagctcattttttaaccaataggccgaaatcggcgcggaacccctatttgtttatttttctaaatacattcaaatatgtatccgctcatgagacaataaccctgataaatgcttcaataatattgaaaaaggaagagtcaggatgaggatcgtttcgcatgattgaacaagatggattgcacgcaggttctccggccgcttgggtggagaggctattcggctatgactgggcacaacagacaatcggctgctctgatgccgccgtgttccggctgtcagcgcaggggcgcccggttctttttgtcaagaccgacctgtccggtgccctgaatgaactgcaagacgaggcagcgcggctatcgtggctggccacgacgggcgttccttgcgcagctgtgctcgacgttgtcactgaagcgggaagggactggctgctattgggcgaagtgccggggcaggatctcctgtcatctcaccttgctcctgccgagaaagtatccatcatggctgatgcaatgcggcggctgcatacgcttgatccggctacctgcccattcgaccaccaagcgaaacatcgcatcgagcgagcacgtactcggatggaagccggtcttgtcgatcaggatgatctggacgaagagcatcaggggctcgcgccagccgaactgttcgccaggctcaaggcgagcatgcccgacggcgaggatctcgtcgtgacccatggcgatgcctgcttgccgaatatcatggtggaaaatggccgcttttctggattcatcgactgtggccggctgggtgtggcggaccgctatcaggacatagcgttggctacccgtgatattgctgaagagcttggcggcgaatgggctgaccgcttcctcgtgctttacggtatcgccgctcccgattcgcagcgcatcgccttctatcgccttcttgacgagttcttctgagcgggactctggggttcgaaatgaccgaccaagcgacgcccaacctgccatcacgagatttcgattccaccgccgccttctatgaaaggttgggcttcggaatcgttttccgggacgccggctggatgatcctccagcgcggggatctcatgctggagttcttcgcccaccctagggggaggctaactgaaacacggaaggagacaataccggaaggaacccgcgctatgacggcaataaaaagacagaataaaacgcacggtgttgggtcgtttgttcataaacgcggggttcggtcccagggctggcactctgtcgataccccaccgagaccccattggggccaatacgcccgcgtttcttccttttccccaccccaccccccaagttcgggtgaaggcccagggctcgcagccaacgtcggggcggcaggccctgccatagcctcaggttactcatatatactttagattgatttaaaacttcatttttaatttaaaaggatctaggtgaagatcctttttgataatctcatgaccaaaatcccttaacgtgagttttcgttccactgagcgtcagaccccgtagaaaagatcaaaggatcttcttgagatcctttttttctgcgcgtaatctgctgcttgcaaacaaaaaaaccaccgctaccagcggtggtttgtttgccggatcaagagctaccaactctttttccgaaggtaactggcttcagcagagcgcagataccaaatactgtccttctagtgtagccgtagttaggccaccacttcaagaactctgtagcaccgcctacatacctcgctctgctaatcctgttaccagtggctgctgccagtggcgataagtcgtgtcttaccgggttggactcaagacgatagttaccggataaggcgcagcggtcgggctgaacggggggttcgtgcacacagcccagcttggagcgaacgacctacaccgaactgagatacctacagcgtgagctatgagaaagcgccacgcttcccgaagggagaaaggcggacaggtatccggtaagcggcagggtcggaacaggagagcgcacgagggagcttccagggggaaacgcctggtatctttatagtcctgtcgggtttcgccacctctgacttgagcgtcgatttttgtgatgctcgtcaggggggcggagcctatggaaaaacgccagcaacgcggcctttttacggttcctggccttttgctggccttttgctcacatgttctttcctgcgttatcccctgattctgctagcttaagcggccgcgatgggccgctccgcctcgcttagacattggccggctggcagccacctcggccccacggtccccgccgccgctgcagccagcttcccgtctccatgacaatagcgcgatcgagaccccgcccctccccgcccctctggcgccgagactcggaggaaagcggggttacgtcaccagggggcggagcccagggaggccagcgcccaatcataggtgaaggaggtgtcaggcactgggctgggcggacccaggggctctcggagaatgtagtctgaaccgctcaggcctcttggtgggcggtgtctgggggaggggagcagacggaggggaggagccaacgcgcgtgcacgagagcgcagcaccgagcgggtgccggtgcggcgctgggttagtgtgagatcgcgaaataaagtacatctcgcccgtcaaagtcaatgcgagaaactttgtatatagttatgcttcggcttgcgtgtggccccattatgcgaagttcccgatatcccgagcttccgcggcgtgcccaaacctgtgccatcttctgtcctggttcaccagcgcccctgtctgtcccagagttcgagtgcgtccgtggcttgtggtggcgggaggtggagagaagaggagagggtctgttttgtattctaactgtgtggccgtcgtgggcaagggctctgcctctgactcagttgtgtgtgtttgcttcgccagcgcctcgctgaacaaacagtggttgggttgggcactgctctgcccagtgtttgcagtggagcgtgggcggatgcgagagtgcgtgcgaaggggaaggcgacttagttaaacaaaagggaaggggacccgcaccctccaccaccaccgacttggcggtgcgagctgcgtgcggtgggaaaaccgggagaaagaggctgcgaggcgtgggagtggagctggggacggtcccgagatctcctcgggtgtagctgattctctgtctggcagttcttgcccaccacccctactctagaaaaaggctaccccggtagttccaggaaccagtgtcttctccctcgccgtccggcggggggtcggtagaaggaaggcgaggcggagacgtgcagacgtctgaatctcgagagctcaagcttactagtgtggataaccgtattaccgccatgcat

SEQ ID NO: 43332 - DNA, 5159 bp, ARTIFICIAL SEQUENCE
  vector containing human replication origin
tagttattaatagtaatcaattacggggtcattagttcatagcccatatatggagttccgcgttacataacttacggtaaatggcccgcctggctgaccgcccaacgacccccgcccattgacgtcaataatgacgtatgttcccatagtaacgccaatagggactttccattgacgtcaatgggtggagtatttacggtaaactgcccacttggcagtacatcaagtgtatcatatgccaagtacgccccctattgacgtcaatgacggtaaatggcccgcctggcattatgcccagtacatgaccttatgggactttcctacttggcagtacatctacgtattagtcatcgctattaccatggtgatgcggttttggcagtacatcaatgggcgtggatagcggtttgactcacggggatttccaagtctccaccccattgacgtcaatgggagtttgttttggcaccaaaatcaacgggactttccaaaatgtcgtaacaactccgccccattgacgcaaatgggcggtaggcgtgtacggtgggaggtctatataagcagagctggtttagtgaaccgtcagatccgctagagcatgaccgagtacaagcccacggtgcgcctcgccacccgcgacgacgtcccccgggccgtacgcaccctcgccgccgcgttcgccgactaccccgccacgcgccacaccgtcgacccggaccgccacatcgagcgggtcaccgagctgcaagaactcttcctcacgcgcgtcgggctcgacatcggcaaggtgtgggtcgcggacgacggcgccgcggtggcggtctggaccacgccggagagcgtcgaagcgggggcggtgttcgccgagatcggcccgcgcatggccgagttgagcggttcccggctggccgcgcagcaacagatggaaggcctcctggcgccgcaccggcccaaggagcccgcgtggttcctggccaccgtcggcgtctcgcccgaccaccagggcaagggtctgggcagcgccgtcgtgctccccggagtggaggcggccgagcgcgccggggtgcccgccttcctggagacctccgcgccccgcaacctccccttctacgagcggctcggcttcaccgtcaccgccgacgtcgaggtgcccgaaggaccgcgcacctggtgcatgacccgcaagcccggtgcctagctgattggtctaaaatgagatacatcaacgctcctccatgttttttgttttctttttaaatgaaaaactttattttttaagaggagtttcaggttcatagcaaaattgagaggaaggtacattcaagctgaggaagttttcctctattcctagtttactgagagattgcatcatgaatgggtgttaaattttgtcaaatgctttttctgtgtctatcaatatgaccatgtgattttcttctttaacctgttgatgggacaaattacgttaattgattttcaaacgttgaaccacccttacatatctggaataaattctacttggttgtggtgtatattttttgatacattcttggattctttttgctaatattttgttgaaaatgtttgtatctttgttcatgagagatattggtctgttgttttcttttcttgtaatgtcattttctagttccggtattaaggtaatgctggcctagttgaatgatttaggaagtattccctctgcttctgtcttctgaaagagattgtagaaagttgatacaatttttttttctttaaatatttgatagaattctgcagtgaattctgcagtcgacggtaccgcgggcccgggatccaccggatctagataactgatcataatcagccataccacatttgtagaggttttacttgctttaaaaaacctcccacacctccccctgaacctgaaacataaaatgaatgcaattgttgttgttaacttgtttattgcagcttataatggttacaaataaagcaatagcatcacaaatttcacaaataaagcatttttttcactgcattctagttgtggtttgtccaaactcatcaatgtatcttaacgcgtaaattgtaagcgttaatattttgttaaaattcgcgttaaatttttgttaaatcagctcattttttaaccaataggccgaaatcggcgcggaacccctatttgtttatttttctaaatacattcaaatatgtatccgctcatgagacaataaccctgataaatgcttcaataatattgaaaaaggaagagtcaggatgaggatcgtttcgcatgattgaacaagatggattgcacgcaggttctccggccgcttgggtggagaggctattcggctatgactgggcacaacagacaatcggctgctctgatgccgccgtgttccggctgtcagcgcaggggcgcccggttctttttgtcaagaccgacctgtccggtgccctgaatgaactgcaagacgaggcagcgcggctatcgtggctggccacgacgggcgttccttgcgcagctgtgctcgacgttgtcactgaagcgggaagggactggctgctattgggcgaagtgccggggcaggatctcctgtcatctcaccttgctcctgccgagaaagtatccatcatggctgatgcaatgcggcggctgcatacgcttgatccggctacctgcccattcgaccaccaagcgaaacatcgcatcgagcgagcacgtactcggatggaagccggtcttgtcgatcaggatgatctggacgaagagcatcaggggctcgcgccagccgaactgttcgccaggctcaaggcgagcatgcccgacggcgaggatctcgtcgtgacccatggcgatgcctgcttgccgaatatcatggtggaaaatggccgcttttctggattcatcgactgtggccggctgggtgtggcggaccgctatcaggacatagcgttggctacccgtgatattgctgaagagcttggcggcgaatgggctgaccgcttcctcgtgctttacggtatcgccgctcccgattcgcagcgcatcgccttctatcgccttcttgacgagttcttctgagcgggactctggggttcgaaatgaccgaccaagcgacgcccaacctgccatcacgagatttcgattccaccgccgccttctatgaaaggttgggcttcggaatcgttttccgggacgccggctggatgatcctccagcgcggggatctcatgctggagttcttcgcccaccctagggggaggctaactgaaacacggaaggagacaataccggaaggaacccgcgctatgacggcaataaaaagacagaataaaacgcacggtgttgggtcgtttgttcataaacgcggggttcggtcccagggctggcactctgtcgataccccaccgagaccccattggggccaatacgcccgcgtttcttccttttccccaccccaccccccaagttcgggtgaaggcccagggctcgcagccaacgtcggggcggcaggccctgccatagcctcaggttactcatatatactttagattgatttaaaacttcatttttaatttaaaaggatctaggtgaagatcctttttgataatctcatgaccaaaatcccttaacgtgagttttcgttccactgagcgtcagaccccgtagaaaagatcaaaggatcttcttgagatcctttttttctgcgcgtaatctgctgcttgcaaacaaaaaaaccaccgctaccagcggtggtttgtttgccggatcaagagctaccaactctttttccgaaggtaactggcttcagcagagcgcagataccaaatactgtccttctagtgtagccgtagttaggccaccacttcaagaactctgtagcaccgcctacatacctcgctctgctaatcctgttaccagtggctgctgccagtggcgataagtcgtgtcttaccgggttggactcaagacgatagttaccggataaggcgcagcggtcgggctgaacggggggttcgtgcacacagcccagcttggagcgaacgacctacaccgaactgagatacctacagcgtgagctatgagaaagcgccacgcttcccgaagggagaaaggcggacaggtatccggtaagcggcagggtcggaacaggagagcgcacgagggagcttccagggggaaacgcctggtatctttatagtcctgtcgggtttcgccacctctgacttgagcgtcgatttttgtgatgctcgtcaggggggcggagcctatggaaaaacgccagcaacgcggcctttttacggttcctggccttttgctggccttttgctcacatgttctttcctgcgttatcccctgattctgctagcttaagcggccgcgattgcagtctgcatctaccccgcctgctttcccctaccccaccccagcccaccccacccccttccatccaccgcagtgatcttgaagggagctgcagaggccctaaagaaacagagataacggctgtaggcagaggccacgttatccaaacctcaccagcccggtctgacccgccgagtcgccaacctccttcctaaggccctagttccaaacaggcctggctgggggcctcccgcttcccagggccgcatccgcccaccacaggcccacaaagcccccacaaatgccaggactccgcggcttcaacttccctccgaaccaattccagtccgattttatgggatcagggtgtgacccccaactgcagaaggcaatgaagagactgcggcgagccattcccagctcgcttacacaataaagggatcccgaggcgagtgctgaccctccccccggccgtcctgctgcagcgcgccccgccacatttcccgcctcgccccctcaaaccgcctgggcctcgcagggcgtccacccccggcctaggcgctccacggagggcgcggcaggacgccctcctcccgcgctccttccccggcgccggcggagtccgaccctccccacgcccgcggccggctccggagcccctcacccgccgcgcgcttccccggccgcgcagagccaatgccctcctgtccctccacccacgggtcgggcgcgcgccgcccgccttccaagatctcgagagctcaagcttactagtgtggataaccgtattaccgccatgcat

SEQ ID NO: 43333 - DNA, 5429 bp, ARTIFICIAL SEQUENCE
  vector containing human replication origin
tagttattaatagtaatcaattacggggtcattagttcatagcccatatatggagttccgcgttacataacttacggtaaatggcccgcctggctgaccgcccaacgacccccgcccattgacgtcaataatgacgtatgttcccatagtaacgccaatagggactttccattgacgtcaatgggtggagtatttacggtaaactgcccacttggcagtacatcaagtgtatcatatgccaagtacgccccctattgacgtcaatgacggtaaatggcccgcctggcattatgcccagtacatgaccttatgggactttcctacttggcagtacatctacgtattagtcatcgctattaccatggtgatgcggttttggcagtacatcaatgggcgtggatagcggtttgactcacggggatttccaagtctccaccccattgacgtcaatgggagtttgttttggcaccaaaatcaacgggactttccaaaatgtcgtaacaactccgccccattgacgcaaatgggcggtaggcgtgtacggtgggaggtctatataagcagagctggtttagtgaaccgtcagatccgctagagcatgaccgagtacaagcccacggtgcgcctcgccacccgcgacgacgtcccccgggccgtacgcaccctcgccgccgcgttcgccgactaccccgccacgcgccacaccgtcgacccggaccgccacatcgagcgggtcaccgagctgcaagaactcttcctcacgcgcgtcgggctcgacatcggcaaggtgtgggtcgcggacgacggcgccgcggtggcggtctggaccacgccggagagcgtcgaagcgggggcggtgttcgccgagatcggcccgcgcatggccgagttgagcggttcccggctggccgcgcagcaacagatggaaggcctcctggcgccgcaccggcccaaggagcccgcgtggttcctggccaccgtcggcgtctcgcccgaccaccagggcaagggtctgggcagcgccgtcgtgctccccggagtggaggcggccgagcgcgccggggtgcccgccttcctggagacctccgcgccccgcaacctccccttctacgagcggctcggcttcaccgtcaccgccgacgtcgaggtgcccgaaggaccgcgcacctggtgcatgacccgcaagcccggtgcctagctgattggtctaaaatgagatacatcaacgctcctccatgttttttgttttctttttaaatgaaaaactttattttttaagaggagtttcaggttcatagcaaaattgagaggaaggtacattcaagctgaggaagttttcctctattcctagtttactgagagattgcatcatgaatgggtgttaaattttgtcaaatgctttttctgtgtctatcaatatgaccatgtgattttcttctttaacctgttgatgggacaaattacgttaattgattttcaaacgttgaaccacccttacatatctggaataaattctacttggttgtggtgtatattttttgatacattcttggattctttttgctaatattttgttgaaaatgtttgtatctttgttcatgagagatattggtctgttgttttcttttcttgtaatgtcattttctagttccggtattaaggtaatgctggcctagttgaatgatttaggaagtattccctctgcttctgtcttctgaaagagattgtagaaagttgatacaatttttttttctttaaatatttgatagaattctgcagtgaattctgcagtcgacggtaccgcgggcccgggatccaccggatctagataactgatcataatcagccataccacatttgtagaggttttacttgctttaaaaaacctcccacacctccccctgaacctgaaacataaaatgaatgcaattgttgttgttaacttgtttattgcagcttataatggttacaaataaagcaatagcatcacaaatttcacaaataaagcatttttttcactgcattctagttgtggtttgtccaaactcatcaatgtatcttaacgcgtaaattgtaagcgttaatattttgttaaaattcgcgttaaatttttgttaaatcagctcattttttaaccaataggccgaaatcggcgcggaacccctatttgtttatttttctaaatacattcaaatatgtatccgctcatgagacaataaccctgataaatgcttcaataatattgaaaaaggaagagtcaggatgaggatcgtttcgcatgattgaacaagatggattgcacgcaggttctccggccgcttgggtggagaggctattcggctatgactgggcacaacagacaatcggctgctctgatgccgccgtgttccggctgtcagcgcaggggcgcccggttctttttgtcaagaccgacctgtccggtgccctgaatgaactgcaagacgaggcagcgcggctatcgtggctggccacgacgggcgttccttgcgcagctgtgctcgacgttgtcactgaagcgggaagggactggctgctattgggcgaagtgccggggcaggatctcctgtcatctcaccttgctcctgccgagaaagtatccatcatggctgatgcaatgcggcggctgcatacgcttgatccggctacctgcccattcgaccaccaagcgaaacatcgcatcgagcgagcacgtactcggatggaagccggtcttgtcgatcaggatgatctggacgaagagcatcaggggctcgcgccagccgaactgttcgccaggctcaaggcgagcatgcccgacggcgaggatctcgtcgtgacccatggcgatgcctgcttgccgaatatcatggtggaaaatggccgcttttctggattcatcgactgtggccggctgggtgtggcggaccgctatcaggacatagcgttggctacccgtgatattgctgaagagcttggcggcgaatgggctgaccgcttcctcgtgctttacggtatcgccgctcccgattcgcagcgcatcgccttctatcgccttcttgacgagttcttctgagcgggactctggggttcgaaatgaccgaccaagcgacgcccaacctgccatcacgagatttcgattccaccgccgccttctatgaaaggttgggcttcggaatcgttttccgggacgccggctggatgatcctccagcgcggggatctcatgctggagttcttcgcccaccctagggggaggctaactgaaacacggaaggagacaataccggaaggaacccgcgctatgacggcaataaaaagacagaataaaacgcacggtgttgggtcgtttgttcataaacgcggggttcggtcccagggctggcactctgtcgataccccaccgagaccccattggggccaatacgcccgcgtttcttccttttccccaccccaccccccaagttcgggtgaaggcccagggctcgcagccaacgtcggggcggcaggccctgccatagcctcaggttactcatatatactttagattgatttaaaacttcatttttaatttaaaaggatctaggtgaagatcctttttgataatctcatgaccaaaatcccttaacgtgagttttcgttccactgagcgtcagaccccgtagaaaagatcaaaggatcttcttgagatcctttttttctgcgcgtaatctgctgcttgcaaacaaaaaaaccaccgctaccagcggtggtttgtttgccggatcaagagctaccaactctttttccgaaggtaactggcttcagcagagcgcagataccaaatactgtccttctagtgtagccgtagttaggccaccacttcaagaactctgtagcaccgcctacatacctcgctctgctaatcctgttaccagtggctgctgccagtggcgataagtcgtgtcttaccgggttggactcaagacgatagttaccggataaggcgcagcggtcgggctgaacggggggttcgtgcacacagcccagcttggagcgaacgacctacaccgaactgagatacctacagcgtgagctatgagaaagcgccacgcttcccgaagggagaaaggcggacaggtatccggtaagcggcagggtcggaacaggagagcgcacgagggagcttccagggggaaacgcctggtatctttatagtcctgtcgggtttcgccacctctgacttgagcgtcgatttttgtgatgctcgtcaggggggcggagcctatggaaaaacgccagcaacgcggcctttttacggttcctggccttttgctggccttttgctcacatgttctttcctgcgttatcccctgattctgctagcttaagcggccgcgatcctaacccacccagcaacccacgcaggggcccttcctgcccagcgcccccccaccctaccgccgggactgcgctttccagccccgcttagaatcccctctcttcctgggaggcagacactggctcgcggggcacgccgagacctccgccgggacactagcccctcgacctcgcgcccccagggatcccacccaccgagaacctggtcctcacgtccccacccccagatctccatcccccagccccccaggggtcgccctcctgcacacccaggccctgacccccgcgggtttcacaaggacttcattccccgctcctccgggagtctctccatctccacccactgaggtcccagtgcccccagcccaggaccctgctcaaactaacctaaggtccccgcagcacaaaccctacagctcagaagcccctctgtcttccccagctcccgcttcggtcccccgttcctgtcctccagagccgcccgggacccctcagcccaggagccattcctccctccacaaactgtcccccagccctgggccgtgcactcggacccgggtagccgcacctctcaccttcagccgaagatggtggcgcgggcgcacgtccccagccgcgaccacagatccagcgcctcagtcccaaacccaccgctgcctccgccgggctcctttagcactgctgctcggggctgccccacccacccctaccctcattgggccagctccacgcccatcaccgccgcccccagacccactggttggtttgcgcgcccatctccaagggaagacgttagcaacccgaacgaagctaccttcccgagtccggctccctccacccacctggaatgacgctcattggctcccgctcccagcccaggccacagaggccccaatctcatgggctggctcttacgcccgtcataggctccgggaggtgcggccggggcagtggcgcgggattggctggctcgtgcgtagatggacagctgaggctggctgatctcgagagctcaagcttactagtgtggataaccgtattaccgccatgcat

SEQ ID NO: 43334 - DNA, 5829 bp, ARTIFICIAL SEQUENCE
  vector containing human replication origin
tagttattaatagtaatcaattacggggtcattagttcatagcccatatatggagttccgcgttacataacttacggtaaatggcccgcctggctgaccgcccaacgacccccgcccattgacgtcaataatgacgtatgttcccatagtaacgccaatagggactttccattgacgtcaatgggtggagtatttacggtaaactgcccacttggcagtacatcaagtgtatcatatgccaagtacgccccctattgacgtcaatgacggtaaatggcccgcctggcattatgcccagtacatgaccttatgggactttcctacttggcagtacatctacgtattagtcatcgctattaccatggtgatgcggttttggcagtacatcaatgggcgtggatagcggtttgactcacggggatttccaagtctccaccccattgacgtcaatgggagtttgttttggcaccaaaatcaacgggactttccaaaatgtcgtaacaactccgccccattgacgcaaatgggcggtaggcgtgtacggtgggaggtctatataagcagagctggtttagtgaaccgtcagatccgctagagcatgaccgagtacaagcccacggtgcgcctcgccacccgcgacgacgtcccccgggccgtacgcaccctcgccgccgcgttcgccgactaccccgccacgcgccacaccgtcgacccggaccgccacatcgagcgggtcaccgagctgcaagaactcttcctcacgcgcgtcgggctcgacatcggcaaggtgtgggtcgcggacgacggcgccgcggtggcggtctggaccacgccggagagcgtcgaagcgggggcggtgttcgccgagatcggcccgcgcatggccgagttgagcggttcccggctggccgcgcagcaacagatggaaggcctcctggcgccgcaccggcccaaggagcccgcgtggttcctggccaccgtcggcgtctcgcccgaccaccagggcaagggtctgggcagcgccgtcgtgctccccggagtggaggcggccgagcgcgccggggtgcccgccttcctggagacctccgcgccccgcaacctccccttctacgagcggctcggcttcaccgtcaccgccgacgtcgaggtgcccgaaggaccgcgcacctggtgcatgacccgcaagcccggtgcctagctgattggtctaaaatgagatacatcaacgctcctccatgttttttgttttctttttaaatgaaaaactttattttttaagaggagtttcaggttcatagcaaaattgagaggaaggtacattcaagctgaggaagttttcctctattcctagtttactgagagattgcatcatgaatgggtgttaaattttgtcaaatgctttttctgtgtctatcaatatgaccatgtgattttcttctttaacctgttgatgggacaaattacgttaattgattttcaaacgttgaaccacccttacatatctggaataaattctacttggttgtggtgtatattttttgatacattcttggattctttttgctaatattttgttgaaaatgtttgtatctttgttcatgagagatattggtctgttgttttcttttcttgtaatgtcattttctagttccggtattaaggtaatgctggcctagttgaatgatttaggaagtattccctctgcttctgtcttctgaaagagattgtagaaagttgatacaatttttttttctttaaatatttgatagaattctgcagtgaattctgcagtcgacggtaccgcgggcccgggatccaccggatctagataactgatcataatcagccataccacatttgtagaggttttacttgctttaaaaaacctcccacacctccccctgaacctgaaacataaaatgaatgcaattgttgttgttaacttgtttattgcagcttataatggttacaaataaagcaatagcatcacaaatttcacaaataaagcatttttttcactgcattctagttgtggtttgtccaaactcatcaatgtatcttaacgcgtaaattgtaagcgttaatattttgttaaaattcgcgttaaatttttgttaaatcagctcattttttaaccaataggccgaaatcggcgcggaacccctatttgtttatttttctaaatacattcaaatatgtatccgctcatgagacaataaccctgataaatgcttcaataatattgaaaaaggaagagtcaggatgaggatcgtttcgcatgattgaacaagatggattgcacgcaggttctccggccgcttgggtggagaggctattcggctatgactgggcacaacagacaatcggctgctctgatgccgccgtgttccggctgtcagcgcaggggcgcccggttctttttgtcaagaccgacctgtccggtgccctgaatgaactgcaagacgaggcagcgcggctatcgtggctggccacgacgggcgttccttgcgcagctgtgctcgacgttgtcactgaagcgggaagggactggctgctattgggcgaagtgccggggcaggatctcctgtcatctcaccttgctcctgccgagaaagtatccatcatggctgatgcaatgcggcggctgcatacgcttgatccggctacctgcccattcgaccaccaagcgaaacatcgcatcgagcgagcacgtactcggatggaagccggtcttgtcgatcaggatgatctggacgaagagcatcaggggctcgcgccagccgaactgttcgccaggctcaaggcgagcatgcccgacggcgaggatctcgtcgtgacccatggcgatgcctgcttgccgaatatcatggtggaaaatggccgcttttctggattcatcgactgtggccggctgggtgtggcggaccgctatcaggacatagcgttggctacccgtgatattgctgaagagcttggcggcgaatgggctgaccgcttcctcgtgctttacggtatcgccgctcccgattcgcagcgcatcgccttctatcgccttcttgacgagttcttctgagcgggactctggggttcgaaatgaccgaccaagcgacgcccaacctgccatcacgagatttcgattccaccgccgccttctatgaaaggttgggcttcggaatcgttttccgggacgccggctggatgatcctccagcgcggggatctcatgctggagttcttcgcccaccctagggggaggctaactgaaacacggaaggagacaataccggaaggaacccgcgctatgacggcaataaaaagacagaataaaacgcacggtgttgggtcgtttgttcataaacgcggggttcggtcccagggctggcactctgtcgataccccaccgagaccccattggggccaatacgcccgcgtttcttccttttccccaccccaccccccaagttcgggtgaaggcccagggctcgcagccaacgtcggggcggcaggccctgccatagcctcaggttactcatatatactttagattgatttaaaacttcatttttaatttaaaaggatctaggtgaagatcctttttgataatctcatgaccaaaatcccttaacgtgagttttcgttccactgagcgtcagaccccgtagaaaagatcaaaggatcttcttgagatcctttttttctgcgcgtaatctgctgcttgcaaacaaaaaaaccaccgctaccagcggtggtttgtttgccggatcaagagctaccaactctttttccgaaggtaactggcttcagcagagcgcagataccaaatactgtccttctagtgtagccgtagttaggccaccacttcaagaactctgtagcaccgcctacatacctcgctctgctaatcctgttaccagtggctgctgccagtggcgataagtcgtgtcttaccgggttggactcaagacgatagttaccggataaggcgcagcggtcgggctgaacggggggttcgtgcacacagcccagcttggagcgaacgacctacaccgaactgagatacctacagcgtgagctatgagaaagcgccacgcttcccgaagggagaaaggcggacaggtatccggtaagcggcagggtcggaacaggagagcgcacgagggagcttccagggggaaacgcctggtatctttatagtcctgtcgggtttcgccacctctgacttgagcgtcgatttttgtgatgctcgtcaggggggcggagcctatggaaaaacgccagcaacgcggcctttttacggttcctggccttttgctggccttttgctcacatgttctttcctgcgttatcccctgattctgctagcttaagcggccgcgatatcgcagagcctttccgagagaaggggcccaaagcgagtcaacttctctactgagcttcccatgaggatgctggatccccaatcctaaccatgcagacgtctgagggtcgccgccattaacgggaatgatatggcccttcctcccccactccctcctctcttctcccctttcaacacttgaattgggctctccgctacttccgcacagcgcaggacccacacgagcccagaaccatcacggcctgctagttcccacccctcccgtcctggaggaccgtaggtggacgctcttgcagagcgcctctcgctggttggggcgggggtgggcggagccagcaccgtctgggctgtggaagcggagggggtggggacactctggcccggttctcggtggtgcgggagcgggcgggagcagcggccgctctggtcggcggacgtgctgccgagtagtcccggaagcgaagcagcgatggcggagagtccgactgaggaggcggcaacggcgggcgccggggcggcgggccccggggcgagcagcgttgctggtgttgttggcgttagcggcagcggcggcgggttcgggccgcctttcctgccggatgtgtgggcggcggcggcggcagcgggcggggccgggggcccggggagcggcctggctccgctgcccgggctcccgccctcagccgctgcccacggggccgcgctgcttagccactgggaccccacgctcagctccgactgggacggcgagcgcaccgcgccgcagtgtctactccggatcaagcggtgagccggggtttttcctcccccagccccgagctccggggctcgaccttccccgccccccaccctctcccactacaactcaccccccacccactgcgctgccctcgcggcggcccacctccacggcccaaatcttgccagctccgggcgtcgggatccaactcccttctccccccaccctcagacccgcaagcaccaacccccgcctcgtgtgcccagatccgaccccgcccctcgacaacctcccgtgagccctccgtctccattccggccaccctcccccacacctcccacctccgggtggaaacccgaccctttagcgcttcagtaacgccccctcccgccttcggcgccgcccctatttccccttccccaccccaaccttgctagatgctgcccgcaggccccacccatcggtcccctctcttctcctctggagccccgttcctaacacagacgaactcagcttcctttgccatgcctctgactcgagccaacctttctttttatcctccgtttttctcagattccctccacacagtcttttcccaggtctagatcgcttccctcgccccaatctttccttgaaccccttttccagtgtcccaaagctgatctcgagagctcaagcttactagtgtggataaccgtattaccgccatgcat

SEQ ID NO: 43335 - DNA, 5599 bp, ARTIFICIAL SEQUENCE
  vector containing human replication origin
tagttattaatagtaatcaattacggggtcattagttcatagcccatatatggagttccgcgttacataacttacggtaaatggcccgcctggctgaccgcccaacgacccccgcccattgacgtcaataatgacgtatgttcccatagtaacgccaatagggactttccattgacgtcaatgggtggagtatttacggtaaactgcccacttggcagtacatcaagtgtatcatatgccaagtacgccccctattgacgtcaatgacggtaaatggcccgcctggcattatgcccagtacatgaccttatgggactttcctacttggcagtacatctacgtattagtcatcgctattaccatggtgatgcggttttggcagtacatcaatgggcgtggatagcggtttgactcacggggatttccaagtctccaccccattgacgtcaatgggagtttgttttggcaccaaaatcaacgggactttccaaaatgtcgtaacaactccgccccattgacgcaaatgggcggtaggcgtgtacggtgggaggtctatataagcagagctggtttagtgaaccgtcagatccgctagagcatgaccgagtacaagcccacggtgcgcctcgccacccgcgacgacgtcccccgggccgtacgcaccctcgccgccgcgttcgccgactaccccgccacgcgccacaccgtcgacccggaccgccacatcgagcgggtcaccgagctgcaagaactcttcctcacgcgcgtcgggctcgacatcggcaaggtgtgggtcgcggacgacggcgccgcggtggcggtctggaccacgccggagagcgtcgaagcgggggcggtgttcgccgagatcggcccgcgcatggccgagttgagcggttcccggctggccgcgcagcaacagatggaaggcctcctggcgccgcaccggcccaaggagcccgcgtggttcctggccaccgtcggcgtctcgcccgaccaccagggcaagggtctgggcagcgccgtcgtgctccccggagtggaggcggccgagcgcgccggggtgcccgccttcctggagacctccgcgccccgcaacctccccttctacgagcggctcggcttcaccgtcaccgccgacgtcgaggtgcccgaaggaccgcgcacctggtgcatgacccgcaagcccggtgcctagctgattggtctaaaatgagatacatcaacgctcctccatgttttttgttttctttttaaatgaaaaactttattttttaagaggagtttcaggttcatagcaaaattgagaggaaggtacattcaagctgaggaagttttcctctattcctagtttactgagagattgcatcatgaatgggtgttaaattttgtcaaatgctttttctgtgtctatcaatatgaccatgtgattttcttctttaacctgttgatgggacaaattacgttaattgattttcaaacgttgaaccacccttacatatctggaataaattctacttggttgtggtgtatattttttgatacattcttggattctttttgctaatattttgttgaaaatgtttgtatctttgttcatgagagatattggtctgttgttttcttttcttgtaatgtcattttctagttccggtattaaggtaatgctggcctagttgaatgatttaggaagtattccctctgcttctgtcttctgaaagagattgtagaaagttgatacaatttttttttctttaaatatttgatagaattctgcagtgaattctgcagtcgacggtaccgcgggcccgggatccaccggatctagataactgatcataatcagccataccacatttgtagaggttttacttgctttaaaaaacctcccacacctccccctgaacctgaaacataaaatgaatgcaattgttgttgttaacttgtttattgcagcttataatggttacaaataaagcaatagcatcacaaatttcacaaataaagcatttttttcactgcattctagttgtggtttgtccaaactcatcaatgtatcttaacgcgtaaattgtaagcgttaatattttgttaaaattcgcgttaaatttttgttaaatcagctcattttttaaccaataggccgaaatcggcgcggaacccctatttgtttatttttctaaatacattcaaatatgtatccgctcatgagacaataaccctgataaatgcttcaataatattgaaaaaggaagagtcaggatgaggatcgtttcgcatgattgaacaagatggattgcacgcaggttctccggccgcttgggtggagaggctattcggctatgactgggcacaacagacaatcggctgctctgatgccgccgtgttccggctgtcagcgcaggggcgcccggttctttttgtcaagaccgacctgtccggtgccctgaatgaactgcaagacgaggcagcgcggctatcgtggctggccacgacgggcgttccttgcgcagctgtgctcgacgttgtcactgaagcgggaagggactggctgctattgggcgaagtgccggggcaggatctcctgtcatctcaccttgctcctgccgagaaagtatccatcatggctgatgcaatgcggcggctgcatacgcttgatccggctacctgcccattcgaccaccaagcgaaacatcgcatcgagcgagcacgtactcggatggaagccggtcttgtcgatcaggatgatctggacgaagagcatcaggggctcgcgccagccgaactgttcgccaggctcaaggcgagcatgcccgacggcgaggatctcgtcgtgacccatggcgatgcctgcttgccgaatatcatggtggaaaatggccgcttttctggattcatcgactgtggccggctgggtgtggcggaccgctatcaggacatagcgttggctacccgtgatattgctgaagagcttggcggcgaatgggctgaccgcttcctcgtgctttacggtatcgccgctcccgattcgcagcgcatcgccttctatcgccttcttgacgagttcttctgagcgggactctggggttcgaaatgaccgaccaagcgacgcccaacctgccatcacgagatttcgattccaccgccgccttctatgaaaggttgggcttcggaatcgttttccgggacgccggctggatgatcctccagcgcggggatctcatgctggagttcttcgcccaccctagggggaggctaactgaaacacggaaggagacaataccggaaggaacccgcgctatgacggcaataaaaagacagaataaaacgcacggtgttgggtcgtttgttcataaacgcggggttcggtcccagggctggcactctgtcgataccccaccgagaccccattggggccaatacgcccgcgtttcttccttttccccaccccaccccccaagttcgggtgaaggcccagggctcgcagccaacgtcggggcggcaggccctgccatagcctcaggttactcatatatactttagattgatttaaaacttcatttttaatttaaaaggatctaggtgaagatcctttttgataatctcatgaccaaaatcccttaacgtgagttttcgttccactgagcgtcagaccccgtagaaaagatcaaaggatcttcttgagatcctttttttctgcgcgtaatctgctgcttgcaaacaaaaaaaccaccgctaccagcggtggtttgtttgccggatcaagagctaccaactctttttccgaaggtaactggcttcagcagagcgcagataccaaatactgtccttctagtgtagccgtagttaggccaccacttcaagaactctgtagcaccgcctacatacctcgctctgctaatcctgttaccagtggctgctgccagtggcgataagtcgtgtcttaccgggttggactcaagacgatagttaccggataaggcgcagcggtcgggctgaacggggggttcgtgcacacagcccagcttggagcgaacgacctacaccgaactgagatacctacagcgtgagctatgagaaagcgccacgcttcccgaagggagaaaggcggacaggtatccggtaagcggcagggtcggaacaggagagcgcacgagggagcttccagggggaaacgcctggtatctttatagtcctgtcgggtttcgccacctctgacttgagcgtcgatttttgtgatgctcgtcaggggggcggagcctatggaaaaacgccagcaacgcggcctttttacggttcctggccttttgctggccttttgctcacatgttctttcctgcgttatcccctgattctgctagcttaagcggccgcgatcggccggccgggcgcgcgcggcggagggagggagccgggaggcagcggaggagcgaccgccgccatattagggaccgcggagcccgggatcccgtcagcggcggccgcggccgggcctgcgggagctgcggaggccggaggcgggcgctgtgcggtgccaggagaggcggggtcggcgggagccagcgagccacgggagcgagccaggtgaggcggccggggtcggggacccgccccccgggccctaggcggcggagcttgactgcgaccccccaaaaccgggacggcggggcgggctgcgacccccaccccagctcaggcccctccaggagcccccagtcccctcgaatgccgcctcccaggccgaactaggcccgggtgacctcagcatccgcgtctcccgagttaacacccaaatcccagcgtcccccccacgtcggggcctgccgtgacccccaccccgagccacctgtaagtcgtgacctccccgcagccgccgtcagcgtccaccattctttttaaaataggctgagccctgcacccccaaccaggggaccccactgcgcacccctagaacagcagaccccgcctcctaacccgggtgatttctccctggcctgtcatccccgggacttcccagttcagaccctcccagcttgggtcctgcccacacgaagccgccccccatcgctgagcctgtggtgtgcgatggctcgcccaggccgcaaccagcccctcgccccagtaaaatgcagtcccagcccgggacacccggaaacctgtgtctgtggtcactgttgtgtccaccagtccccgcaggcacgggttgagtgcatggatgtccccgtctcacctcatctcgctgatttctgctcccccaccctcccagcgtgccccctaccagcccccattcccccgaaatccagctctcccaccaaagcctcagacgagctatccgtgcacaagcccctccctcctccgaactgaacctccgtcctgcgtcctgccccgtgtcttctccaaacgcaagcctggccatctcggatccccagaatatggagtgtgccccccattcagagccgttttacccctactcaaacctgtgacaccccctccccctcttccaccgtccagacctgtctccaccccacgtcctgagacccccgatatatctcgagagctcaagcttactagtgtggataaccgtattaccgccatgcat

SEQ ID NO: 43336 - DNA, 5479 bp, ARTIFICIAL SEQUENCE
  vector containing human replication origin
tagttattaatagtaatcaattacggggtcattagttcatagcccatatatggagttccgcgttacataacttacggtaaatggcccgcctggctgaccgcccaacgacccccgcccattgacgtcaataatgacgtatgttcccatagtaacgccaatagggactttccattgacgtcaatgggtggagtatttacggtaaactgcccacttggcagtacatcaagtgtatcatatgccaagtacgccccctattgacgtcaatgacggtaaatggcccgcctggcattatgcccagtacatgaccttatgggactttcctacttggcagtacatctacgtattagtcatcgctattaccatggtgatgcggttttggcagtacatcaatgggcgtggatagcggtttgactcacggggatttccaagtctccaccccattgacgtcaatgggagtttgttttggcaccaaaatcaacgggactttccaaaatgtcgtaacaactccgccccattgacgcaaatgggcggtaggcgtgtacggtgggaggtctatataagcagagctggtttagtgaaccgtcagatccgctagagcatgaccgagtacaagcccacggtgcgcctcgccacccgcgacgacgtcccccgggccgtacgcaccctcgccgccgcgttcgccgactaccccgccacgcgccacaccgtcgacccggaccgccacatcgagcgggtcaccgagctgcaagaactcttcctcacgcgcgtcgggctcgacatcggcaaggtgtgggtcgcggacgacggcgccgcggtggcggtctggaccacgccggagagcgtcgaagcgggggcggtgttcgccgagatcggcccgcgcatggccgagttgagcggttcccggctggccgcgcagcaacagatggaaggcctcctggcgccgcaccggcccaaggagcccgcgtggttcctggccaccgtcggcgtctcgcccgaccaccagggcaagggtctgggcagcgccgtcgtgctccccggagtggaggcggccgagcgcgccggggtgcccgccttcctggagacctccgcgccccgcaacctccccttctacgagcggctcggcttcaccgtcaccgccgacgtcgaggtgcccgaaggaccgcgcacctggtgcatgacccgcaagcccggtgcctagctgattggtctaaaatgagatacatcaacgctcctccatgttttttgttttctttttaaatgaaaaactttattttttaagaggagtttcaggttcatagcaaaattgagaggaaggtacattcaagctgaggaagttttcctctattcctagtttactgagagattgcatcatgaatgggtgttaaattttgtcaaatgctttttctgtgtctatcaatatgaccatgtgattttcttctttaacctgttgatgggacaaattacgttaattgattttcaaacgttgaaccacccttacatatctggaataaattctacttggttgtggtgtatattttttgatacattcttggattctttttgctaatattttgttgaaaatgtttgtatctttgttcatgagagatattggtctgttgttttcttttcttgtaatgtcattttctagttccggtattaaggtaatgctggcctagttgaatgatttaggaagtattccctctgcttctgtcttctgaaagagattgtagaaagttgatacaatttttttttctttaaatatttgatagaattctgcagtgaattctgcagtcgacggtaccgcgggcccgggatccaccggatctagataactgatcataatcagccataccacatttgtagaggttttacttgctttaaaaaacctcccacacctccccctgaacctgaaacataaaatgaatgcaattgttgttgttaacttgtttattgcagcttataatggttacaaataaagcaatagcatcacaaatttcacaaataaagcatttttttcactgcattctagttgtggtttgtccaaactcatcaatgtatcttaacgcgtaaattgtaagcgttaatattttgttaaaattcgcgttaaatttttgttaaatcagctcattttttaaccaataggccgaaatcggcgcggaacccctatttgtttatttttctaaatacattcaaatatgtatccgctcatgagacaataaccctgataaatgcttcaataatattgaaaaaggaagagtcaggatgaggatcgtttcgcatgattgaacaagatggattgcacgcaggttctccggccgcttgggtggagaggctattcggctatgactgggcacaacagacaatcggctgctctgatgccgccgtgttccggctgtcagcgcaggggcgcccggttctttttgtcaagaccgacctgtccggtgccctgaatgaactgcaagacgaggcagcgcggctatcgtggctggccacgacgggcgttccttgcgcagctgtgctcgacgttgtcactgaagcgggaagggactggctgctattgggcgaagtgccggggcaggatctcctgtcatctcaccttgctcctgccgagaaagtatccatcatggctgatgcaatgcggcggctgcatacgcttgatccggctacctgcccattcgaccaccaagcgaaacatcgcatcgagcgagcacgtactcggatggaagccggtcttgtcgatcaggatgatctggacgaagagcatcaggggctcgcgccagccgaactgttcgccaggctcaaggcgagcatgcccgacggcgaggatctcgtcgtgacccatggcgatgcctgcttgccgaatatcatggtggaaaatggccgcttttctggattcatcgactgtggccggctgggtgtggcggaccgctatcaggacatagcgttggctacccgtgatattgctgaagagcttggcggcgaatgggctgaccgcttcctcgtgctttacggtatcgccgctcccgattcgcagcgcatcgccttctatcgccttcttgacgagttcttctgagcgggactctggggttcgaaatgaccgaccaagcgacgcccaacctgccatcacgagatttcgattccaccgccgccttctatgaaaggttgggcttcggaatcgttttccgggacgccggctggatgatcctccagcgcggggatctcatgctggagttcttcgcccaccctagggggaggctaactgaaacacggaaggagacaataccggaaggaacccgcgctatgacggcaataaaaagacagaataaaacgcacggtgttgggtcgtttgttcataaacgcggggttcggtcccagggctggcactctgtcgataccccaccgagaccccattggggccaatacgcccgcgtttcttccttttccccaccccaccccccaagttcgggtgaaggcccagggctcgcagccaacgtcggggcggcaggccctgccatagcctcaggttactcatatatactttagattgatttaaaacttcatttttaatttaaaaggatctaggtgaagatcctttttgataatctcatgaccaaaatcccttaacgtgagttttcgttccactgagcgtcagaccccgtagaaaagatcaaaggatcttcttgagatcctttttttctgcgcgtaatctgctgcttgcaaacaaaaaaaccaccgctaccagcggtggtttgtttgccggatcaagagctaccaactctttttccgaaggtaactggcttcagcagagcgcagataccaaatactgtccttctagtgtagccgtagttaggccaccacttcaagaactctgtagcaccgcctacatacctcgctctgctaatcctgttaccagtggctgctgccagtggcgataagtcgtgtcttaccgggttggactcaagacgatagttaccggataaggcgcagcggtcgggctgaacggggggttcgtgcacacagcccagcttggagcgaacgacctacaccgaactgagatacctacagcgtgagctatgagaaagcgccacgcttcccgaagggagaaaggcggacaggtatccggtaagcggcagggtcggaacaggagagcgcacgagggagcttccagggggaaacgcctggtatctttatagtcctgtcgggtttcgccacctctgacttgagcgtcgatttttgtgatgctcgtcaggggggcggagcctatggaaaaacgccagcaacgcggcctttttacggttcctggccttttgctggccttttgctcacatgttctttcctgcgttatcccctgattctgctagcttaagcggccgcgatggactcgctccccgctgccccacgcgcggcccctcccacggtaccgccccgcgcttccgcttccggtctggggagaggtgcgctgcacgtccccttccggctcgcgcgggcagcctcgcagagtcgagcgtgttgggggttcggcgcttaggcgacaggcgcggcgggcgggagcggcggccgcgaaccccagccttgggcagaggtgttctagtttgcttagtgggcacaaagttgggccctggcctggggcagtagcgggggtaaggttggccctgggggcggggccaggctgtgagccgcacgaggcctgggggcggggctggttgtgggcggagatcagttccggggcggggctgaaggcggggaaccggctgaggccgtaccaggcctggagggcgaggctgattgggcagagaccagttccagggtcggggctgtgggtggggcccagttctcggggcggatggtataaggcttctagagcggggatgactgagcagagaccagttacaggggtggagacctccatttccggggcggggctgagcgggaaccaggctgtggttgtgacagccctggaggttggggctggctgtgggcggagataagctccgggccgggcggagggcggggactaggctgtgggtgtaccggtcttggagggcagtggtgattggcagagagcagttctaggggcggagctatggggtggcagcaagcctgggggcggggctgactgtgggcggagaccagttctgggggcgggactgtgggctgcaccaggcctggggagggggcagtgggtggagaccagttccaggggcagggatctgggtatgaataaaagggtgtatgatgtgggtgggttgggataggcccaggagccaggattgtgggagatcagattcaggggtagggccttccttggatccctagattgttgatacagttactgccccatgttcatacaacccaataggatcagattatgtatgcacatttgtctataacttgctttcccaaggcagaacatagtgatttaacactatctcgagagctcaagcttactagtgtggataaccgtattaccgccatgcat

SEQ ID NO: 43337 - DNA, 5649 bp, ARTIFICIAL SEQUENCE
  vector containing human replication origin
tagttattaatagtaatcaattacggggtcattagttcatagcccatatatggagttccgcgttacataacttacggtaaatggcccgcctggctgaccgcccaacgacccccgcccattgacgtcaataatgacgtatgttcccatagtaacgccaatagggactttccattgacgtcaatgggtggagtatttacggtaaactgcccacttggcagtacatcaagtgtatcatatgccaagtacgccccctattgacgtcaatgacggtaaatggcccgcctggcattatgcccagtacatgaccttatgggactttcctacttggcagtacatctacgtattagtcatcgctattaccatggtgatgcggttttggcagtacatcaatgggcgtggatagcggtttgactcacggggatttccaagtctccaccccattgacgtcaatgggagtttgttttggcaccaaaatcaacgggactttccaaaatgtcgtaacaactccgccccattgacgcaaatgggcggtaggcgtgtacggtgggaggtctatataagcagagctggtttagtgaaccgtcagatccgctagagcatgaccgagtacaagcccacggtgcgcctcgccacccgcgacgacgtcccccgggccgtacgcaccctcgccgccgcgttcgccgactaccccgccacgcgccacaccgtcgacccggaccgccacatcgagcgggtcaccgagctgcaagaactcttcctcacgcgcgtcgggctcgacatcggcaaggtgtgggtcgcggacgacggcgccgcggtggcggtctggaccacgccggagagcgtcgaagcgggggcggtgttcgccgagatcggcccgcgcatggccgagttgagcggttcccggctggccgcgcagcaacagatggaaggcctcctggcgccgcaccggcccaaggagcccgcgtggttcctggccaccgtcggcgtctcgcccgaccaccagggcaagggtctgggcagcgccgtcgtgctccccggagtggaggcggccgagcgcgccggggtgcccgccttcctggagacctccgcgccccgcaacctccccttctacgagcggctcggcttcaccgtcaccgccgacgtcgaggtgcccgaaggaccgcgcacctggtgcatgacccgcaagcccggtgcctagctgattggtctaaaatgagatacatcaacgctcctccatgttttttgttttctttttaaatgaaaaactttattttttaagaggagtttcaggttcatagcaaaattgagaggaaggtacattcaagctgaggaagttttcctctattcctagtttactgagagattgcatcatgaatgggtgttaaattttgtcaaatgctttttctgtgtctatcaatatgaccatgtgattttcttctttaacctgttgatgggacaaattacgttaattgattttcaaacgttgaaccacccttacatatctggaataaattctacttggttgtggtgtatattttttgatacattcttggattctttttgctaatattttgttgaaaatgtttgtatctttgttcatgagagatattggtctgttgttttcttttcttgtaatgtcattttctagttccggtattaaggtaatgctggcctagttgaatgatttaggaagtattccctctgcttctgtcttctgaaagagattgtagaaagttgatacaatttttttttctttaaatatttgatagaattctgcagtgaattctgcagtcgacggtaccgcgggcccgggatccaccggatctagataactgatcataatcagccataccacatttgtagaggttttacttgctttaaaaaacctcccacacctccccctgaacctgaaacataaaatgaatgcaattgttgttgttaacttgtttattgcagcttataatggttacaaataaagcaatagcatcacaaatttcacaaataaagcatttttttcactgcattctagttgtggtttgtccaaactcatcaatgtatcttaacgcgtaaattgtaagcgttaatattttgttaaaattcgcgttaaatttttgttaaatcagctcattttttaaccaataggccgaaatcggcgcggaacccctatttgtttatttttctaaatacattcaaatatgtatccgctcatgagacaataaccctgataaatgcttcaataatattgaaaaaggaagagtcaggatgaggatcgtttcgcatgattgaacaagatggattgcacgcaggttctccggccgcttgggtggagaggctattcggctatgactgggcacaacagacaatcggctgctctgatgccgccgtgttccggctgtcagcgcaggggcgcccggttctttttgtcaagaccgacctgtccggtgccctgaatgaactgcaagacgaggcagcgcggctatcgtggctggccacgacgggcgttccttgcgcagctgtgctcgacgttgtcactgaagcgggaagggactggctgctattgggcgaagtgccggggcaggatctcctgtcatctcaccttgctcctgccgagaaagtatccatcatggctgatgcaatgcggcggctgcatacgcttgatccggctacctgcccattcgaccaccaagcgaaacatcgcatcgagcgagcacgtactcggatggaagccggtcttgtcgatcaggatgatctggacgaagagcatcaggggctcgcgccagccgaactgttcgccaggctcaaggcgagcatgcccgacggcgaggatctcgtcgtgacccatggcgatgcctgcttgccgaatatcatggtggaaaatggccgcttttctggattcatcgactgtggccggctgggtgtggcggaccgctatcaggacatagcgttggctacccgtgatattgctgaagagcttggcggcgaatgggctgaccgcttcctcgtgctttacggtatcgccgctcccgattcgcagcgcatcgccttctatcgccttcttgacgagttcttctgagcgggactctggggttcgaaatgaccgaccaagcgacgcccaacctgccatcacgagatttcgattccaccgccgccttctatgaaaggttgggcttcggaatcgttttccgggacgccggctggatgatcctccagcgcggggatctcatgctggagttcttcgcccaccctagggggaggctaactgaaacacggaaggagacaataccggaaggaacccgcgctatgacggcaataaaaagacagaataaaacgcacggtgttgggtcgtttgttcataaacgcggggttcggtcccagggctggcactctgtcgataccccaccgagaccccattggggccaatacgcccgcgtttcttccttttccccaccccaccccccaagttcgggtgaaggcccagggctcgcagccaacgtcggggcggcaggccctgccatagcctcaggttactcatatatactttagattgatttaaaacttcatttttaatttaaaaggatctaggtgaagatcctttttgataatctcatgaccaaaatcccttaacgtgagttttcgttccactgagcgtcagaccccgtagaaaagatcaaaggatcttcttgagatcctttttttctgcgcgtaatctgctgcttgcaaacaaaaaaaccaccgctaccagcggtggtttgtttgccggatcaagagctaccaactctttttccgaaggtaactggcttcagcagagcgcagataccaaatactgtccttctagtgtagccgtagttaggccaccacttcaagaactctgtagcaccgcctacatacctcgctctgctaatcctgttaccagtggctgctgccagtggcgataagtcgtgtcttaccgggttggactcaagacgatagttaccggataaggcgcagcggtcgggctgaacggggggttcgtgcacacagcccagcttggagcgaacgacctacaccgaactgagatacctacagcgtgagctatgagaaagcgccacgcttcccgaagggagaaaggcggacaggtatccggtaagcggcagggtcggaacaggagagcgcacgagggagcttccagggggaaacgcctggtatctttatagtcctgtcgggtttcgccacctctgacttgagcgtcgatttttgtgatgctcgtcaggggggcggagcctatggaaaaacgccagcaacgcggcctttttacggttcctggccttttgctggccttttgctcacatgttctttcctgcgttatcccctgattctgctagcttaagcggccgcgatcgcttcccctgggaaggggcctccggcatccccgcgcgcagcctagacctccagtcgcgtccacggcgccggccccaccctgcaggatcggccggatcctcgcaggcccgcgacccccgaggcccccggagcagacacatccttctcgcagaggccactcacctgctccgccgccgccgccgccgccgccgccgccgccgctgcctccgcctccccgtgcgcacccggctcggccctccgcaaactccagaccgggcctctcccgcagcggcgcctggggggcggggccgacgcccgcggccggccaatcagcggctgcctctcggtgctcgcagccaatccgcgtcttccgcttcgggtggacccgacggaaacattccagagggatccctccgcctcgcccggctcttcccgactcctcccctcgccgcgaagcagtggaccgttccgccccgcctaagccgcggctggctgtaccaccggagggctgaggaggggggggagctgcagctgggccccggccaatcgcgagggaggaaggagacaagcggccaatgggaaggaagctggggcccctgaaccacgtgctgtcggctgagtgtcagtctcgggtgccctgggtggtgaggggcgggggagtcaggtgacctaggccaggtttcggggaaaggattcgaacttccgacgtccaggaaagcggacagtttaggagacctgggtgggggtcaatggcagtccccaacccagttccctgcccggcctcctctgccccagcctggccatcctcggagcggataaaaagatgcattcaatctctgggggcgggcgggggatcgagatgaatagggagggtcccgagtttccctgcttcctgggctgtacaatggacaaaggcattcattcattcattcgttcactcactcatcaaatatttaatgtgccagactgctccgtgccagactctgtcctacctctgaagacgcgtcagtgaataagctgaatgtgctcctggtagaggtaacagagcgtgcaaaagccggacagagagatacagcacgctttaggatactgcaatatcgtgggagctagtaaatcagtgtggaaaggcaagatgcaatgaaagacaagggtgagatagtttatctgcttgttggtttgtttatgtgctaggtcacagaaggtacccagccagcctttcatagatctgtctcctccatctgatctcgagagctcaagcttactagtgtggataaccgtattaccgccatgcat

SEQ ID NO: 43338 - DNA, 5359 bp, ARTIFICIAL SEQUENCE
  vector containing human replication origin
tagttattaatagtaatcaattacggggtcattagttcatagcccatatatggagttccgcgttacataacttacggtaaatggcccgcctggctgaccgcccaacgacccccgcccattgacgtcaataatgacgtatgttcccatagtaacgccaatagggactttccattgacgtcaatgggtggagtatttacggtaaactgcccacttggcagtacatcaagtgtatcatatgccaagtacgccccctattgacgtcaatgacggtaaatggcccgcctggcattatgcccagtacatgaccttatgggactttcctacttggcagtacatctacgtattagtcatcgctattaccatggtgatgcggttttggcagtacatcaatgggcgtggatagcggtttgactcacggggatttccaagtctccaccccattgacgtcaatgggagtttgttttggcaccaaaatcaacgggactttccaaaatgtcgtaacaactccgccccattgacgcaaatgggcggtaggcgtgtacggtgggaggtctatataagcagagctggtttagtgaaccgtcagatccgctagagcatgaccgagtacaagcccacggtgcgcctcgccacccgcgacgacgtcccccgggccgtacgcaccctcgccgccgcgttcgccgactaccccgccacgcgccacaccgtcgacccggaccgccacatcgagcgggtcaccgagctgcaagaactcttcctcacgcgcgtcgggctcgacatcggcaaggtgtgggtcgcggacgacggcgccgcggtggcggtctggaccacgccggagagcgtcgaagcgggggcggtgttcgccgagatcggcccgcgcatggccgagttgagcggttcccggctggccgcgcagcaacagatggaaggcctcctggcgccgcaccggcccaaggagcccgcgtggttcctggccaccgtcggcgtctcgcccgaccaccagggcaagggtctgggcagcgccgtcgtgctccccggagtggaggcggccgagcgcgccggggtgcccgccttcctggagacctccgcgccccgcaacctccccttctacgagcggctcggcttcaccgtcaccgccgacgtcgaggtgcccgaaggaccgcgcacctggtgcatgacccgcaagcccggtgcctagctgattggtctaaaatgagatacatcaacgctcctccatgttttttgttttctttttaaatgaaaaactttattttttaagaggagtttcaggttcatagcaaaattgagaggaaggtacattcaagctgaggaagttttcctctattcctagtttactgagagattgcatcatgaatgggtgttaaattttgtcaaatgctttttctgtgtctatcaatatgaccatgtgattttcttctttaacctgttgatgggacaaattacgttaattgattttcaaacgttgaaccacccttacatatctggaataaattctacttggttgtggtgtatattttttgatacattcttggattctttttgctaatattttgttgaaaatgtttgtatctttgttcatgagagatattggtctgttgttttcttttcttgtaatgtcattttctagttccggtattaaggtaatgctggcctagttgaatgatttaggaagtattccctctgcttctgtcttctgaaagagattgtagaaagttgatacaatttttttttctttaaatatttgatagaattctgcagtgaattctgcagtcgacggtaccgcgggcccgggatccaccggatctagataactgatcataatcagccataccacatttgtagaggttttacttgctttaaaaaacctcccacacctccccctgaacctgaaacataaaatgaatgcaattgttgttgttaacttgtttattgcagcttataatggttacaaataaagcaatagcatcacaaatttcacaaataaagcatttttttcactgcattctagttgtggtttgtccaaactcatcaatgtatcttaacgcgtaaattgtaagcgttaatattttgttaaaattcgcgttaaatttttgttaaatcagctcattttttaaccaataggccgaaatcggcgcggaacccctatttgtttatttttctaaatacattcaaatatgtatccgctcatgagacaataaccctgataaatgcttcaataatattgaaaaaggaagagtcaggatgaggatcgtttcgcatgattgaacaagatggattgcacgcaggttctccggccgcttgggtggagaggctattcggctatgactgggcacaacagacaatcggctgctctgatgccgccgtgttccggctgtcagcgcaggggcgcccggttctttttgtcaagaccgacctgtccggtgccctgaatgaactgcaagacgaggcagcgcggctatcgtggctggccacgacgggcgttccttgcgcagctgtgctcgacgttgtcactgaagcgggaagggactggctgctattgggcgaagtgccggggcaggatctcctgtcatctcaccttgctcctgccgagaaagtatccatcatggctgatgcaatgcggcggctgcatacgcttgatccggctacctgcccattcgaccaccaagcgaaacatcgcatcgagcgagcacgtactcggatggaagccggtcttgtcgatcaggatgatctggacgaagagcatcaggggctcgcgccagccgaactgttcgccaggctcaaggcgagcatgcccgacggcgaggatctcgtcgtgacccatggcgatgcctgcttgccgaatatcatggtggaaaatggccgcttttctggattcatcgactgtggccggctgggtgtggcggaccgctatcaggacatagcgttggctacccgtgatattgctgaagagcttggcggcgaatgggctgaccgcttcctcgtgctttacggtatcgccgctcccgattcgcagcgcatcgccttctatcgccttcttgacgagttcttctgagcgggactctggggttcgaaatgaccgaccaagcgacgcccaacctgccatcacgagatttcgattccaccgccgccttctatgaaaggttgggcttcggaatcgttttccgggacgccggctggatgatcctccagcgcggggatctcatgctggagttcttcgcccaccctagggggaggctaactgaaacacggaaggagacaataccggaaggaacccgcgctatgacggcaataaaaagacagaataaaacgcacggtgttgggtcgtttgttcataaacgcggggttcggtcccagggctggcactctgtcgataccccaccgagaccccattggggccaatacgcccgcgtttcttccttttccccaccccaccccccaagttcgggtgaaggcccagggctcgcagccaacgtcggggcggcaggccctgccatagcctcaggttactcatatatactttagattgatttaaaacttcatttttaatttaaaaggatctaggtgaagatcctttttgataatctcatgaccaaaatcccttaacgtgagttttcgttccactgagcgtcagaccccgtagaaaagatcaaaggatcttcttgagatcctttttttctgcgcgtaatctgctgcttgcaaacaaaaaaaccaccgctaccagcggtggtttgtttgccggatcaagagctaccaactctttttccgaaggtaactggcttcagcagagcgcagataccaaatactgtccttctagtgtagccgtagttaggccaccacttcaagaactctgtagcaccgcctacatacctcgctctgctaatcctgttaccagtggctgctgccagtggcgataagtcgtgtcttaccgggttggactcaagacgatagttaccggataaggcgcagcggtcgggctgaacggggggttcgtgcacacagcccagcttggagcgaacgacctacaccgaactgagatacctacagcgtgagctatgagaaagcgccacgcttcccgaagggagaaaggcggacaggtatccggtaagcggcagggtcggaacaggagagcgcacgagggagcttccagggggaaacgcctggtatctttatagtcctgtcgggtttcgccacctctgacttgagcgtcgatttttgtgatgctcgtcaggggggcggagcctatggaaaaacgccagcaacgcggcctttttacggttcctggccttttgctggccttttgctcacatgttctttcctgcgttatcccctgattctgctagcttaagcggccgcgattcgacagaccccccaccctgaaccttgcccgcgcccccacagaacctgggggtggggaagatgtccctgggtcccgggcccactaccccctcggtgggtcttggggcgcgacagttaatgggaggtcctgagccctggccttatggaatttcacgcaggtatttgcctaatacttacaaaaacagaaacagacttttaaaaagcggttgtaggagagaaaggagacagggcgtcctgtctgggccgccctgcaacaacagccccgtcccctgccgcgcctcctccgcactgaccacacccaccccaaccccacccccaccgcactgaccgctcctatcctcaaccccgccccctccgcggtgaccacacctaccctcaaccccgccccctccgtcctgaccactcttaaccccgccccctccgcactgaccacacccaccacaaatcccgcccctcagcgctgaccgcacccaccctcgaccccgccccccgcactgaccacacccaccgcaacctcatcccctcagcactaaccacatccactctcaaccccgtccccttcgcactgaccacacccaccccgttcggccccgccccccgcactgaacacacccgccctcaaccccgcaccctccgcactcacctccccctcgccgctcgaccccgccctcaccacactgaccaccctcaacccattgcgcccagtccccaccacagtgaccacaccctcactggctcggccctgcccccagtatactgaccattccccagccacttcccttccgcacttaccactcccccagccacgcccctccccgctgaccgctcctccagccccgcctcccccgtacaggcagagcgcccgcccacctctatgctgcgttctcctgactttacgttggcccctcctctgccaagcccccaggggagatctcgagagctcaagcttactagtgtggataaccgtattaccgccatgcat

SEQ ID NO: 43339 - DNA, 5119 bp, ARTIFICIAL SEQUENCE
  vector containing human replication origin
tagttattaatagtaatcaattacggggtcattagttcatagcccatatatggagttccgcgttacataacttacggtaaatggcccgcctggctgaccgcccaacgacccccgcccattgacgtcaataatgacgtatgttcccatagtaacgccaatagggactttccattgacgtcaatgggtggagtatttacggtaaactgcccacttggcagtacatcaagtgtatcatatgccaagtacgccccctattgacgtcaatgacggtaaatggcccgcctggcattatgcccagtacatgaccttatgggactttcctacttggcagtacatctacgtattagtcatcgctattaccatggtgatgcggttttggcagtacatcaatgggcgtggatagcggtttgactcacggggatttccaagtctccaccccattgacgtcaatgggagtttgttttggcaccaaaatcaacgggactttccaaaatgtcgtaacaactccgccccattgacgcaaatgggcggtaggcgtgtacggtgggaggtctatataagcagagctggtttagtgaaccgtcagatccgctagagcatgaccgagtacaagcccacggtgcgcctcgccacccgcgacgacgtcccccgggccgtacgcaccctcgccgccgcgttcgccgactaccccgccacgcgccacaccgtcgacccggaccgccacatcgagcgggtcaccgagctgcaagaactcttcctcacgcgcgtcgggctcgacatcggcaaggtgtgggtcgcggacgacggcgccgcggtggcggtctggaccacgccggagagcgtcgaagcgggggcggtgttcgccgagatcggcccgcgcatggccgagttgagcggttcccggctggccgcgcagcaacagatggaaggcctcctggcgccgcaccggcccaaggagcccgcgtggttcctggccaccgtcggcgtctcgcccgaccaccagggcaagggtctgggcagcgccgtcgtgctccccggagtggaggcggccgagcgcgccggggtgcccgccttcctggagacctccgcgccccgcaacctccccttctacgagcggctcggcttcaccgtcaccgccgacgtcgaggtgcccgaaggaccgcgcacctggtgcatgacccgcaagcccggtgcctagctgattggtctaaaatgagatacatcaacgctcctccatgttttttgttttctttttaaatgaaaaactttattttttaagaggagtttcaggttcatagcaaaattgagaggaaggtacattcaagctgaggaagttttcctctattcctagtttactgagagattgcatcatgaatgggtgttaaattttgtcaaatgctttttctgtgtctatcaatatgaccatgtgattttcttctttaacctgttgatgggacaaattacgttaattgattttcaaacgttgaaccacccttacatatctggaataaattctacttggttgtggtgtatattttttgatacattcttggattctttttgctaatattttgttgaaaatgtttgtatctttgttcatgagagatattggtctgttgttttcttttcttgtaatgtcattttctagttccggtattaaggtaatgctggcctagttgaatgatttaggaagtattccctctgcttctgtcttctgaaagagattgtagaaagttgatacaatttttttttctttaaatatttgatagaattctgcagtgaattctgcagtcgacggtaccgcgggcccgggatccaccggatctagataactgatcataatcagccataccacatttgtagaggttttacttgctttaaaaaacctcccacacctccccctgaacctgaaacataaaatgaatgcaattgttgttgttaacttgtttattgcagcttataatggttacaaataaagcaatagcatcacaaatttcacaaataaagcatttttttcactgcattctagttgtggtttgtccaaactcatcaatgtatcttaacgcgtaaattgtaagcgttaatattttgttaaaattcgcgttaaatttttgttaaatcagctcattttttaaccaataggccgaaatcggcgcggaacccctatttgtttatttttctaaatacattcaaatatgtatccgctcatgagacaataaccctgataaatgcttcaataatattgaaaaaggaagagtcaggatgaggatcgtttcgcatgattgaacaagatggattgcacgcaggttctccggccgcttgggtggagaggctattcggctatgactgggcacaacagacaatcggctgctctgatgccgccgtgttccggctgtcagcgcaggggcgcccggttctttttgtcaagaccgacctgtccggtgccctgaatgaactgcaagacgaggcagcgcggctatcgtggctggccacgacgggcgttccttgcgcagctgtgctcgacgttgtcactgaagcgggaagggactggctgctattgggcgaagtgccggggcaggatctcctgtcatctcaccttgctcctgccgagaaagtatccatcatggctgatgcaatgcggcggctgcatacgcttgatccggctacctgcccattcgaccaccaagcgaaacatcgcatcgagcgagcacgtactcggatggaagccggtcttgtcgatcaggatgatctggacgaagagcatcaggggctcgcgccagccgaactgttcgccaggctcaaggcgagcatgcccgacggcgaggatctcgtcgtgacccatggcgatgcctgcttgccgaatatcatggtggaaaatggccgcttttctggattcatcgactgtggccggctgggtgtggcggaccgctatcaggacatagcgttggctacccgtgatattgctgaagagcttggcggcgaatgggctgaccgcttcctcgtgctttacggtatcgccgctcccgattcgcagcgcatcgccttctatcgccttcttgacgagttcttctgagcgggactctggggttcgaaatgaccgaccaagcgacgcccaacctgccatcacgagatttcgattccaccgccgccttctatgaaaggttgggcttcggaatcgttttccgggacgccggctggatgatcctccagcgcggggatctcatgctggagttcttcgcccaccctagggggaggctaactgaaacacggaaggagacaataccggaaggaacccgcgctatgacggcaataaaaagacagaataaaacgcacggtgttgggtcgtttgttcataaacgcggggttcggtcccagggctggcactctgtcgataccccaccgagaccccattggggccaatacgcccgcgtttcttccttttccccaccccaccccccaagttcgggtgaaggcccagggctcgcagccaacgtcggggcggcaggccctgccatagcctcaggttactcatatatactttagattgatttaaaacttcatttttaatttaaaaggatctaggtgaagatcctttttgataatctcatgaccaaaatcccttaacgtgagttttcgttccactgagcgtcagaccccgtagaaaagatcaaaggatcttcttgagatcctttttttctgcgcgtaatctgctgcttgcaaacaaaaaaaccaccgctaccagcggtggtttgtttgccggatcaagagctaccaactctttttccgaaggtaactggcttcagcagagcgcagataccaaatactgtccttctagtgtagccgtagttaggccaccacttcaagaactctgtagcaccgcctacatacctcgctctgctaatcctgttaccagtggctgctgccagtggcgataagtcgtgtcttaccgggttggactcaagacgatagttaccggataaggcgcagcggtcgggctgaacggggggttcgtgcacacagcccagcttggagcgaacgacctacaccgaactgagatacctacagcgtgagctatgagaaagcgccacgcttcccgaagggagaaaggcggacaggtatccggtaagcggcagggtcggaacaggagagcgcacgagggagcttccagggggaaacgcctggtatctttatagtcctgtcgggtttcgccacctctgacttgagcgtcgatttttgtgatgctcgtcaggggggcggagcctatggaaaaacgccagcaacgcggcctttttacggttcctggccttttgctggccttttgctcacatgttctttcctgcgttatcccctgattctgctagcttaagcggccgcgataggccgtggacggcaagtgagtccgaggcctgggggtgggggggcgggtccgcacgtggatgtgggtgtagacctcgctggtagacggcaagtgattcagatgggggcgggcgtggtgtccaaacagatgtagacctcgtcagtgggcgtcctgaaggggaagtgaatgggaccctggggaaggggcagatcctcacagttgtagaccatggaaggcaagtgagtcctgacccaggggaatgggtaggtttgcatgctgccagtgtagactggtggggactgtggaggggtaagtcagtcagaccccaggagaggaggagagcaggtttgcccgcgagtgtataccatgtgcaggtgagtgaggccccatgtgcccggaaggggtgccagtgctacaagaggtggaccagctgctcaacgccgcagggggtggtggaatggccggggatggcagaatggcaggcagggtgaaccttcttcgtgaccctctcctcctcctctccagagccatgaacaccagccaggtggaggcgctggggatccagatgctgcctggctaccgggacccctaccacggccggcccctcaccaagggtgagctgggctgcttcctgagccactacaacatctggaaggaggtgtgtcctgagtgatgggcggggccagagttatgactctagatctcatcggatctcgagagctcaagcttactagtgtggataaccgtattaccgccatgcat

SEQ ID NO: 43340 - DNA, 5339 bp, ARTIFICIAL SEQUENCE
  vector containing human replication origin
tagttattaatagtaatcaattacggggtcattagttcatagcccatatatggagttccgcgttacataacttacggtaaatggcccgcctggctgaccgcccaacgacccccgcccattgacgtcaataatgacgtatgttcccatagtaacgccaatagggactttccattgacgtcaatgggtggagtatttacggtaaactgcccacttggcagtacatcaagtgtatcatatgccaagtacgccccctattgacgtcaatgacggtaaatggcccgcctggcattatgcccagtacatgaccttatgggactttcctacttggcagtacatctacgtattagtcatcgctattaccatggtgatgcggttttggcagtacatcaatgggcgtggatagcggtttgactcacggggatttccaagtctccaccccattgacgtcaatgggagtttgttttggcaccaaaatcaacgggactttccaaaatgtcgtaacaactccgccccattgacgcaaatgggcggtaggcgtgtacggtgggaggtctatataagcagagctggtttagtgaaccgtcagatccgctagagcatgaccgagtacaagcccacggtgcgcctcgccacccgcgacgacgtcccccgggccgtacgcaccctcgccgccgcgttcgccgactaccccgccacgcgccacaccgtcgacccggaccgccacatcgagcgggtcaccgagctgcaagaactcttcctcacgcgcgtcgggctcgacatcggcaaggtgtgggtcgcggacgacggcgccgcggtggcggtctggaccacgccggagagcgtcgaagcgggggcggtgttcgccgagatcggcccgcgcatggccgagttgagcggttcccggctggccgcgcagcaacagatggaaggcctcctggcgccgcaccggcccaaggagcccgcgtggttcctggccaccgtcggcgtctcgcccgaccaccagggcaagggtctgggcagcgccgtcgtgctccccggagtggaggcggccgagcgcgccggggtgcccgccttcctggagacctccgcgccccgcaacctccccttctacgagcggctcggcttcaccgtcaccgccgacgtcgaggtgcccgaaggaccgcgcacctggtgcatgacccgcaagcccggtgcctagctgattggtctaaaatgagatacatcaacgctcctccatgttttttgttttctttttaaatgaaaaactttattttttaagaggagtttcaggttcatagcaaaattgagaggaaggtacattcaagctgaggaagttttcctctattcctagtttactgagagattgcatcatgaatgggtgttaaattttgtcaaatgctttttctgtgtctatcaatatgaccatgtgattttcttctttaacctgttgatgggacaaattacgttaattgattttcaaacgttgaaccacccttacatatctggaataaattctacttggttgtggtgtatattttttgatacattcttggattctttttgctaatattttgttgaaaatgtttgtatctttgttcatgagagatattggtctgttgttttcttttcttgtaatgtcattttctagttccggtattaaggtaatgctggcctagttgaatgatttaggaagtattccctctgcttctgtcttctgaaagagattgtagaaagttgatacaatttttttttctttaaatatttgatagaattctgcagtgaattctgcagtcgacggtaccgcgggcccgggatccaccggatctagataactgatcataatcagccataccacatttgtagaggttttacttgctttaaaaaacctcccacacctccccctgaacctgaaacataaaatgaatgcaattgttgttgttaacttgtttattgcagcttataatggttacaaataaagcaatagcatcacaaatttcacaaataaagcatttttttcactgcattctagttgtggtttgtccaaactcatcaatgtatcttaacgcgtaaattgtaagcgttaatattttgttaaaattcgcgttaaatttttgttaaatcagctcattttttaaccaataggccgaaatcggcgcggaacccctatttgtttatttttctaaatacattcaaatatgtatccgctcatgagacaataaccctgataaatgcttcaataatattgaaaaaggaagagtcaggatgaggatcgtttcgcatgattgaacaagatggattgcacgcaggttctccggccgcttgggtggagaggctattcggctatgactgggcacaacagacaatcggctgctctgatgccgccgtgttccggctgtcagcgcaggggcgcccggttctttttgtcaagaccgacctgtccggtgccctgaatgaactgcaagacgaggcagcgcggctatcgtggctggccacgacgggcgttccttgcgcagctgtgctcgacgttgtcactgaagcgggaagggactggctgctattgggcgaagtgccggggcaggatctcctgtcatctcaccttgctcctgccgagaaagtatccatcatggctgatgcaatgcggcggctgcatacgcttgatccggctacctgcccattcgaccaccaagcgaaacatcgcatcgagcgagcacgtactcggatggaagccggtcttgtcgatcaggatgatctggacgaagagcatcaggggctcgcgccagccgaactgttcgccaggctcaaggcgagcatgcccgacggcgaggatctcgtcgtgacccatggcgatgcctgcttgccgaatatcatggtggaaaatggccgcttttctggattcatcgactgtggccggctgggtgtggcggaccgctatcaggacatagcgttggctacccgtgatattgctgaagagcttggcggcgaatgggctgaccgcttcctcgtgctttacggtatcgccgctcccgattcgcagcgcatcgccttctatcgccttcttgacgagttcttctgagcgggactctggggttcgaaatgaccgaccaagcgacgcccaacctgccatcacgagatttcgattccaccgccgccttctatgaaaggttgggcttcggaatcgttttccgggacgccggctggatgatcctccagcgcggggatctcatgctggagttcttcgcccaccctagggggaggctaactgaaacacggaaggagacaataccggaaggaacccgcgctatgacggcaataaaaagacagaataaaacgcacggtgttgggtcgtttgttcataaacgcggggttcggtcccagggctggcactctgtcgataccccaccgagaccccattggggccaatacgcccgcgtttcttccttttccccaccccaccccccaagttcgggtgaaggcccagggctcgcagccaacgtcggggcggcaggccctgccatagcctcaggttactcatatatactttagattgatttaaaacttcatttttaatttaaaaggatctaggtgaagatcctttttgataatctcatgaccaaaatcccttaacgtgagttttcgttccactgagcgtcagaccccgtagaaaagatcaaaggatcttcttgagatcctttttttctgcgcgtaatctgctgcttgcaaacaaaaaaaccaccgctaccagcggtggtttgtttgccggatcaagagctaccaactctttttccgaaggtaactggcttcagcagagcgcagataccaaatactgtccttctagtgtagccgtagttaggccaccacttcaagaactctgtagcaccgcctacatacctcgctctgctaatcctgttaccagtggctgctgccagtggcgataagtcgtgtcttaccgggttggactcaagacgatagttaccggataaggcgcagcggtcgggctgaacggggggttcgtgcacacagcccagcttggagcgaacgacctacaccgaactgagatacctacagcgtgagctatgagaaagcgccacgcttcccgaagggagaaaggcggacaggtatccggtaagcggcagggtcggaacaggagagcgcacgagggagcttccagggggaaacgcctggtatctttatagtcctgtcgggtttcgccacctctgacttgagcgtcgatttttgtgatgctcgtcaggggggcggagcctatggaaaaacgccagcaacgcggcctttttacggttcctggccttttgctggccttttgctcacatgttctttcctgcgttatcccctgattctgctagcttaagcggccgcgatcaccgagtggccactggccagagacgtggatgacaggcgccgtttgcgggccccactacagttgttggggatgctgaaggcacagcgcttgtggtagttcagcccgcagcctgcagggggcgccagagagtaagagacatggcgtctgcccctcctaggtctcttcttgagaagttgtgccctttccacccaatctctcacctggtcctgtcccatcaccccccgccagcacgatctcctccaaaaggcactactatccgtaagtgtatcagccccttcaggcccacccctccttagagttctgccccaagttccagcttgtagccccaccatcaccccatctgtcccccagaccctgaacacacccacaccccttttctcactccaacaagggacacctcaaaggctccccccaaagctctgtccccagtttcagcttgtagccctgccatcaccccatctgtcccccagaccctgaacacgcctcacacccaaaattttcccactccaacaagggatacctcaaaggttccctccaaagctccacccctagttccagcttgtagccccgacatcaccccatctgccccccaggccctgaacgcgcctcacaccccaccttttcccactgcaacaatggatgcctcaaaagtccccgccaaagctctgacccagccccagtcctctatggtaagcacctccttctagtcctccccaaaactcctgtccatctccctagagacacctgttcccccttctaaccctgaccttcctttttctgaggcccctttggttccccctctttccccaaccccaactttccaaaagaaaatgcctctcctcacccccacccctaaggtcactatccctccaggtctgctcaccccctgtaccccactttctcttttctatctcgagagctcaagcttactagtgtggataaccgtattaccgccatgcat

SEQ ID NO: 43341 - DNA, 5429 bp, ARTIFICIAL SEQUENCE
  vector containing human replication origin
tagttattaatagtaatcaattacggggtcattagttcatagcccatatatggagttccgcgttacataacttacggtaaatggcccgcctggctgaccgcccaacgacccccgcccattgacgtcaataatgacgtatgttcccatagtaacgccaatagggactttccattgacgtcaatgggtggagtatttacggtaaactgcccacttggcagtacatcaagtgtatcatatgccaagtacgccccctattgacgtcaatgacggtaaatggcccgcctggcattatgcccagtacatgaccttatgggactttcctacttggcagtacatctacgtattagtcatcgctattaccatggtgatgcggttttggcagtacatcaatgggcgtggatagcggtttgactcacggggatttccaagtctccaccccattgacgtcaatgggagtttgttttggcaccaaaatcaacgggactttccaaaatgtcgtaacaactccgccccattgacgcaaatgggcggtaggcgtgtacggtgggaggtctatataagcagagctggtttagtgaaccgtcagatccgctagagcatgaccgagtacaagcccacggtgcgcctcgccacccgcgacgacgtcccccgggccgtacgcaccctcgccgccgcgttcgccgactaccccgccacgcgccacaccgtcgacccggaccgccacatcgagcgggtcaccgagctgcaagaactcttcctcacgcgcgtcgggctcgacatcggcaaggtgtgggtcgcggacgacggcgccgcggtggcggtctggaccacgccggagagcgtcgaagcgggggcggtgttcgccgagatcggcccgcgcatggccgagttgagcggttcccggctggccgcgcagcaacagatggaaggcctcctggcgccgcaccggcccaaggagcccgcgtggttcctggccaccgtcggcgtctcgcccgaccaccagggcaagggtctgggcagcgccgtcgtgctccccggagtggaggcggccgagcgcgccggggtgcccgccttcctggagacctccgcgccccgcaacctccccttctacgagcggctcggcttcaccgtcaccgccgacgtcgaggtgcccgaaggaccgcgcacctggtgcatgacccgcaagcccggtgcctagctgattggtctaaaatgagatacatcaacgctcctccatgttttttgttttctttttaaatgaaaaactttattttttaagaggagtttcaggttcatagcaaaattgagaggaaggtacattcaagctgaggaagttttcctctattcctagtttactgagagattgcatcatgaatgggtgttaaattttgtcaaatgctttttctgtgtctatcaatatgaccatgtgattttcttctttaacctgttgatgggacaaattacgttaattgattttcaaacgttgaaccacccttacatatctggaataaattctacttggttgtggtgtatattttttgatacattcttggattctttttgctaatattttgttgaaaatgtttgtatctttgttcatgagagatattggtctgttgttttcttttcttgtaatgtcattttctagttccggtattaaggtaatgctggcctagttgaatgatttaggaagtattccctctgcttctgtcttctgaaagagattgtagaaagttgatacaatttttttttctttaaatatttgatagaattctgcagtgaattctgcagtcgacggtaccgcgggcccgggatccaccggatctagataactgatcataatcagccataccacatttgtagaggttttacttgctttaaaaaacctcccacacctccccctgaacctgaaacataaaatgaatgcaattgttgttgttaacttgtttattgcagcttataatggttacaaataaagcaatagcatcacaaatttcacaaataaagcatttttttcactgcattctagttgtggtttgtccaaactcatcaatgtatcttaacgcgtaaattgtaagcgttaatattttgttaaaattcgcgttaaatttttgttaaatcagctcattttttaaccaataggccgaaatcggcgcggaacccctatttgtttatttttctaaatacattcaaatatgtatccgctcatgagacaataaccctgataaatgcttcaataatattgaaaaaggaagagtcaggatgaggatcgtttcgcatgattgaacaagatggattgcacgcaggttctccggccgcttgggtggagaggctattcggctatgactgggcacaacagacaatcggctgctctgatgccgccgtgttccggctgtcagcgcaggggcgcccggttctttttgtcaagaccgacctgtccggtgccctgaatgaactgcaagacgaggcagcgcggctatcgtggctggccacgacgggcgttccttgcgcagctgtgctcgacgttgtcactgaagcgggaagggactggctgctattgggcgaagtgccggggcaggatctcctgtcatctcaccttgctcctgccgagaaagtatccatcatggctgatgcaatgcggcggctgcatacgcttgatccggctacctgcccattcgaccaccaagcgaaacatcgcatcgagcgagcacgtactcggatggaagccggtcttgtcgatcaggatgatctggacgaagagcatcaggggctcgcgccagccgaactgttcgccaggctcaaggcgagcatgcccgacggcgaggatctcgtcgtgacccatggcgatgcctgcttgccgaatatcatggtggaaaatggccgcttttctggattcatcgactgtggccggctgggtgtggcggaccgctatcaggacatagcgttggctacccgtgatattgctgaagagcttggcggcgaatgggctgaccgcttcctcgtgctttacggtatcgccgctcccgattcgcagcgcatcgccttctatcgccttcttgacgagttcttctgagcgggactctggggttcgaaatgaccgaccaagcgacgcccaacctgccatcacgagatttcgattccaccgccgccttctatgaaaggttgggcttcggaatcgttttccgggacgccggctggatgatcctccagcgcggggatctcatgctggagttcttcgcccaccctagggggaggctaactgaaacacggaaggagacaataccggaaggaacccgcgctatgacggcaataaaaagacagaataaaacgcacggtgttgggtcgtttgttcataaacgcggggttcggtcccagggctggcactctgtcgataccccaccgagaccccattggggccaatacgcccgcgtttcttccttttccccaccccaccccccaagttcgggtgaaggcccagggctcgcagccaacgtcggggcggcaggccctgccatagcctcaggttactcatatatactttagattgatttaaaacttcatttttaatttaaaaggatctaggtgaagatcctttttgataatctcatgaccaaaatcccttaacgtgagttttcgttccactgagcgtcagaccccgtagaaaagatcaaaggatcttcttgagatcctttttttctgcgcgtaatctgctgcttgcaaacaaaaaaaccaccgctaccagcggtggtttgtttgccggatcaagagctaccaactctttttccgaaggtaactggcttcagcagagcgcagataccaaatactgtccttctagtgtagccgtagttaggccaccacttcaagaactctgtagcaccgcctacatacctcgctctgctaatcctgttaccagtggctgctgccagtggcgataagtcgtgtcttaccgggttggactcaagacgatagttaccggataaggcgcagcggtcgggctgaacggggggttcgtgcacacagcccagcttggagcgaacgacctacaccgaactgagatacctacagcgtgagctatgagaaagcgccacgcttcccgaagggagaaaggcggacaggtatccggtaagcggcagggtcggaacaggagagcgcacgagggagcttccagggggaaacgcctggtatctttatagtcctgtcgggtttcgccacctctgacttgagcgtcgatttttgtgatgctcgtcaggggggcggagcctatggaaaaacgccagcaacgcggcctttttacggttcctggccttttgctggccttttgctcacatgttctttcctgcgttatcccctgattctgctagcttaagcggccgcgatattcaaaaagacccttgtcaatattcagtatcaaaacagttgcactattgatttctctttctcctaattggccccaagagaccacatcaaaggagagtacagtttaagccattaagctgcaggatgtacacctaacagacctcgcagaaaccttaccagaaagtggggattggttagagaaaggaactttcaaagatcagcaaattgctagtgtcctctaacctaccacacagggcgaatcccttaggcccctgcggactcctgcccattccactggactccacaaacgctcctcaggatctactactccgcagaccccgctacacaccccacctcctccaaggcagtctgaaatgcctgcagaaggccctaaccccaattcggagccacttcaggccactccaagccaccaccagcaaccagcccccgtcccgcctaagccccaagcttggcccctgtaaaactcctgctcaatcaacaagccccacccaactctcaggcccgcccatctggccgcccccggccctgctctagctctgcctagagtccaacacgcaccgtccagtcccctcccagtcccctcccgcgggccccgcccccagccagcccgcgagtcccacaagccccgcccaggccccgccccacggaccccgcctctctggcaccgagtccccgccccagagccccgcccgccgctcaccttcgctgtccgcggccccgaaggcctcctgctccaggcgccgcgcctcctcgcggccgcgcaactcgaagcgccgcgcccagccgggccgcgcccgccacagctcctgcaccagcagcgggcgctcggagtcgcccagcacgcgcaggtgctccgcccgccactcgccgcttcccacgcccgccgccgcgggccggcccagagcgtcgcacaaagcgaaggcgtccacgcagctgctctcgccggggccaccgccggggctgcctgctaggccgtagcgctctagcgcctcggccacgaatctcgagagctcaagcttactagtgtggataaccgtattaccgccatgcat

SEQ ID NO: 43342 - DNA, 5429 bp, ARTIFICIAL SEQUENCE
  vector containing human replication origin
tagttattaatagtaatcaattacggggtcattagttcatagcccatatatggagttccgcgttacataacttacggtaaatggcccgcctggctgaccgcccaacgacccccgcccattgacgtcaataatgacgtatgttcccatagtaacgccaatagggactttccattgacgtcaatgggtggagtatttacggtaaactgcccacttggcagtacatcaagtgtatcatatgccaagtacgccccctattgacgtcaatgacggtaaatggcccgcctggcattatgcccagtacatgaccttatgggactttcctacttggcagtacatctacgtattagtcatcgctattaccatggtgatgcggttttggcagtacatcaatgggcgtggatagcggtttgactcacggggatttccaagtctccaccccattgacgtcaatgggagtttgttttggcaccaaaatcaacgggactttccaaaatgtcgtaacaactccgccccattgacgcaaatgggcggtaggcgtgtacggtgggaggtctatataagcagagctggtttagtgaaccgtcagatccgctagagcatgaccgagtacaagcccacggtgcgcctcgccacccgcgacgacgtcccccgggccgtacgcaccctcgccgccgcgttcgccgactaccccgccacgcgccacaccgtcgacccggaccgccacatcgagcgggtcaccgagctgcaagaactcttcctcacgcgcgtcgggctcgacatcggcaaggtgtgggtcgcggacgacggcgccgcggtggcggtctggaccacgccggagagcgtcgaagcgggggcggtgttcgccgagatcggcccgcgcatggccgagttgagcggttcccggctggccgcgcagcaacagatggaaggcctcctggcgccgcaccggcccaaggagcccgcgtggttcctggccaccgtcggcgtctcgcccgaccaccagggcaagggtctgggcagcgccgtcgtgctccccggagtggaggcggccgagcgcgccggggtgcccgccttcctggagacctccgcgccccgcaacctccccttctacgagcggctcggcttcaccgtcaccgccgacgtcgaggtgcccgaaggaccgcgcacctggtgcatgacccgcaagcccggtgcctagctgattggtctaaaatgagatacatcaacgctcctccatgttttttgttttctttttaaatgaaaaactttattttttaagaggagtttcaggttcatagcaaaattgagaggaaggtacattcaagctgaggaagttttcctctattcctagtttactgagagattgcatcatgaatgggtgttaaattttgtcaaatgctttttctgtgtctatcaatatgaccatgtgattttcttctttaacctgttgatgggacaaattacgttaattgattttcaaacgttgaaccacccttacatatctggaataaattctacttggttgtggtgtatattttttgatacattcttggattctttttgctaatattttgttgaaaatgtttgtatctttgttcatgagagatattggtctgttgttttcttttcttgtaatgtcattttctagttccggtattaaggtaatgctggcctagttgaatgatttaggaagtattccctctgcttctgtcttctgaaagagattgtagaaagttgatacaatttttttttctttaaatatttgatagaattctgcagtgaattctgcagtcgacggtaccgcgggcccgggatccaccggatctagataactgatcataatcagccataccacatttgtagaggttttacttgctttaaaaaacctcccacacctccccctgaacctgaaacataaaatgaatgcaattgttgttgttaacttgtttattgcagcttataatggttacaaataaagcaatagcatcacaaatttcacaaataaagcatttttttcactgcattctagttgtggtttgtccaaactcatcaatgtatcttaacgcgtaaattgtaagcgttaatattttgttaaaattcgcgttaaatttttgttaaatcagctcattttttaaccaataggccgaaatcggcgcggaacccctatttgtttatttttctaaatacattcaaatatgtatccgctcatgagacaataaccctgataaatgcttcaataatattgaaaaaggaagagtcaggatgaggatcgtttcgcatgattgaacaagatggattgcacgcaggttctccggccgcttgggtggagaggctattcggctatgactgggcacaacagacaatcggctgctctgatgccgccgtgttccggctgtcagcgcaggggcgcccggttctttttgtcaagaccgacctgtccggtgccctgaatgaactgcaagacgaggcagcgcggctatcgtggctggccacgacgggcgttccttgcgcagctgtgctcgacgttgtcactgaagcgggaagggactggctgctattgggcgaagtgccggggcaggatctcctgtcatctcaccttgctcctgccgagaaagtatccatcatggctgatgcaatgcggcggctgcatacgcttgatccggctacctgcccattcgaccaccaagcgaaacatcgcatcgagcgagcacgtactcggatggaagccggtcttgtcgatcaggatgatctggacgaagagcatcaggggctcgcgccagccgaactgttcgccaggctcaaggcgagcatgcccgacggcgaggatctcgtcgtgacccatggcgatgcctgcttgccgaatatcatggtggaaaatggccgcttttctggattcatcgactgtggccggctgggtgtggcggaccgctatcaggacatagcgttggctacccgtgatattgctgaagagcttggcggcgaatgggctgaccgcttcctcgtgctttacggtatcgccgctcccgattcgcagcgcatcgccttctatcgccttcttgacgagttcttctgagcgggactctggggttcgaaatgaccgaccaagcgacgcccaacctgccatcacgagatttcgattccaccgccgccttctatgaaaggttgggcttcggaatcgttttccgggacgccggctggatgatcctccagcgcggggatctcatgctggagttcttcgcccaccctagggggaggctaactgaaacacggaaggagacaataccggaaggaacccgcgctatgacggcaataaaaagacagaataaaacgcacggtgttgggtcgtttgttcataaacgcggggttcggtcccagggctggcactctgtcgataccccaccgagaccccattggggccaatacgcccgcgtttcttccttttccccaccccaccccccaagttcgggtgaaggcccagggctcgcagccaacgtcggggcggcaggccctgccatagcctcaggttactcatatatactttagattgatttaaaacttcatttttaatttaaaaggatctaggtgaagatcctttttgataatctcatgaccaaaatcccttaacgtgagttttcgttccactgagcgtcagaccccgtagaaaagatcaaaggatcttcttgagatcctttttttctgcgcgtaatctgctgcttgcaaacaaaaaaaccaccgctaccagcggtggtttgtttgccggatcaagagctaccaactctttttccgaaggtaactggcttcagcagagcgcagataccaaatactgtccttctagtgtagccgtagttaggccaccacttcaagaactctgtagcaccgcctacatacctcgctctgctaatcctgttaccagtggctgctgccagtggcgataagtcgtgtcttaccgggttggactcaagacgatagttaccggataaggcgcagcggtcgggctgaacggggggttcgtgcacacagcccagcttggagcgaacgacctacaccgaactgagatacctacagcgtgagctatgagaaagcgccacgcttcccgaagggagaaaggcggacaggtatccggtaagcggcagggtcggaacaggagagcgcacgagggagcttccagggggaaacgcctggtatctttatagtcctgtcgggtttcgccacctctgacttgagcgtcgatttttgtgatgctcgtcaggggggcggagcctatggaaaaacgccagcaacgcggcctttttacggttcctggccttttgctggccttttgctcacatgttctttcctgcgttatcccctgattctgctagcttaagcggccgcgatccctccggcgtctctctcctccctgttgcttctctccctgagtttcattccctaaccccgattttcttccctctggcttccgccccccacagttatatttcacacaccccgccagtgccagctgcgaccccatagtctccccattgtgttatttctctgctcctctgggatctgtccgcgctctgagttcttccctagctccgggggatccattcctctatttgagttctgtctccaccccctgagatctgtcccgccccctaaattgtgatccgcaccccctggcatcctcacccgccctctgaatttgtctcctcccctaggatctgtcgctgacctgagttctgcccccgccctctgagttctctccccaccgttggagttgtgtccccttctcctaggatctgtccctggctctgttcccgccctctcagttctgtccttgccccctggaatctgttcctgccatctgagttctaccccttccccacaggatctatctctgccccctggaatctgtccccacccaccgagttctggcctccgtccctgggatctgtccccgccctctgtgttctacccctgccccatgggatctgtccccgcccacccagttctccccgccccctggatctctccctaccctcccagtcttgccccggccccatgggatctgtccccgccctccgacttctgaccctcgccactgggatctgtcctcgacctcccagtcctgcctccgcccccggaatctgaccccgcccaccgagctctggcctccgcccctgagatctgtccccgccctcccagtcttgcccctgccccatgggatctgtcccccgcccaccgcctccgcctctgggatctgtccctgccctcccagtcctgctcccacccccggaatctgtccccgcccaccgaactctgtctccacgccggaattccagcgccgccccgttgggtagagcccggcccttccctgtcctgggcccgcagacagatctcgagagctcaagcttactagtgtggataaccgtattaccgccatgcat

SEQ ID NO: 43343 - DNA, 5429 bp, ARTIFICIAL SEQUENCE
  vector containing human replication origin
tagttattaatagtaatcaattacggggtcattagttcatagcccatatatggagttccgcgttacataacttacggtaaatggcccgcctggctgaccgcccaacgacccccgcccattgacgtcaataatgacgtatgttcccatagtaacgccaatagggactttccattgacgtcaatgggtggagtatttacggtaaactgcccacttggcagtacatcaagtgtatcatatgccaagtacgccccctattgacgtcaatgacggtaaatggcccgcctggcattatgcccagtacatgaccttatgggactttcctacttggcagtacatctacgtattagtcatcgctattaccatggtgatgcggttttggcagtacatcaatgggcgtggatagcggtttgactcacggggatttccaagtctccaccccattgacgtcaatgggagtttgttttggcaccaaaatcaacgggactttccaaaatgtcgtaacaactccgccccattgacgcaaatgggcggtaggcgtgtacggtgggaggtctatataagcagagctggtttagtgaaccgtcagatccgctagagcatgaccgagtacaagcccacggtgcgcctcgccacccgcgacgacgtcccccgggccgtacgcaccctcgccgccgcgttcgccgactaccccgccacgcgccacaccgtcgacccggaccgccacatcgagcgggtcaccgagctgcaagaactcttcctcacgcgcgtcgggctcgacatcggcaaggtgtgggtcgcggacgacggcgccgcggtggcggtctggaccacgccggagagcgtcgaagcgggggcggtgttcgccgagatcggcccgcgcatggccgagttgagcggttcccggctggccgcgcagcaacagatggaaggcctcctggcgccgcaccggcccaaggagcccgcgtggttcctggccaccgtcggcgtctcgcccgaccaccagggcaagggtctgggcagcgccgtcgtgctccccggagtggaggcggccgagcgcgccggggtgcccgccttcctggagacctccgcgccccgcaacctccccttctacgagcggctcggcttcaccgtcaccgccgacgtcgaggtgcccgaaggaccgcgcacctggtgcatgacccgcaagcccggtgcctagctgattggtctaaaatgagatacatcaacgctcctccatgttttttgttttctttttaaatgaaaaactttattttttaagaggagtttcaggttcatagcaaaattgagaggaaggtacattcaagctgaggaagttttcctctattcctagtttactgagagattgcatcatgaatgggtgttaaattttgtcaaatgctttttctgtgtctatcaatatgaccatgtgattttcttctttaacctgttgatgggacaaattacgttaattgattttcaaacgttgaaccacccttacatatctggaataaattctacttggttgtggtgtatattttttgatacattcttggattctttttgctaatattttgttgaaaatgtttgtatctttgttcatgagagatattggtctgttgttttcttttcttgtaatgtcattttctagttccggtattaaggtaatgctggcctagttgaatgatttaggaagtattccctctgcttctgtcttctgaaagagattgtagaaagttgatacaatttttttttctttaaatatttgatagaattctgcagtgaattctgcagtcgacggtaccgcgggcccgggatccaccggatctagataactgatcataatcagccataccacatttgtagaggttttacttgctttaaaaaacctcccacacctccccctgaacctgaaacataaaatgaatgcaattgttgttgttaacttgtttattgcagcttataatggttacaaataaagcaatagcatcacaaatttcacaaataaagcatttttttcactgcattctagttgtggtttgtccaaactcatcaatgtatcttaacgcgtaaattgtaagcgttaatattttgttaaaattcgcgttaaatttttgttaaatcagctcattttttaaccaataggccgaaatcggcgcggaacccctatttgtttatttttctaaatacattcaaatatgtatccgctcatgagacaataaccctgataaatgcttcaataatattgaaaaaggaagagtcaggatgaggatcgtttcgcatgattgaacaagatggattgcacgcaggttctccggccgcttgggtggagaggctattcggctatgactgggcacaacagacaatcggctgctctgatgccgccgtgttccggctgtcagcgcaggggcgcccggttctttttgtcaagaccgacctgtccggtgccctgaatgaactgcaagacgaggcagcgcggctatcgtggctggccacgacgggcgttccttgcgcagctgtgctcgacgttgtcactgaagcgggaagggactggctgctattgggcgaagtgccggggcaggatctcctgtcatctcaccttgctcctgccgagaaagtatccatcatggctgatgcaatgcggcggctgcatacgcttgatccggctacctgcccattcgaccaccaagcgaaacatcgcatcgagcgagcacgtactcggatggaagccggtcttgtcgatcaggatgatctggacgaagagcatcaggggctcgcgccagccgaactgttcgccaggctcaaggcgagcatgcccgacggcgaggatctcgtcgtgacccatggcgatgcctgcttgccgaatatcatggtggaaaatggccgcttttctggattcatcgactgtggccggctgggtgtggcggaccgctatcaggacatagcgttggctacccgtgatattgctgaagagcttggcggcgaatgggctgaccgcttcctcgtgctttacggtatcgccgctcccgattcgcagcgcatcgccttctatcgccttcttgacgagttcttctgagcgggactctggggttcgaaatgaccgaccaagcgacgcccaacctgccatcacgagatttcgattccaccgccgccttctatgaaaggttgggcttcggaatcgttttccgggacgccggctggatgatcctccagcgcggggatctcatgctggagttcttcgcccaccctagggggaggctaactgaaacacggaaggagacaataccggaaggaacccgcgctatgacggcaataaaaagacagaataaaacgcacggtgttgggtcgtttgttcataaacgcggggttcggtcccagggctggcactctgtcgataccccaccgagaccccattggggccaatacgcccgcgtttcttccttttccccaccccaccccccaagttcgggtgaaggcccagggctcgcagccaacgtcggggcggcaggccctgccatagcctcaggttactcatatatactttagattgatttaaaacttcatttttaatttaaaaggatctaggtgaagatcctttttgataatctcatgaccaaaatcccttaacgtgagttttcgttccactgagcgtcagaccccgtagaaaagatcaaaggatcttcttgagatcctttttttctgcgcgtaatctgctgcttgcaaacaaaaaaaccaccgctaccagcggtggtttgtttgccggatcaagagctaccaactctttttccgaaggtaactggcttcagcagagcgcagataccaaatactgtccttctagtgtagccgtagttaggccaccacttcaagaactctgtagcaccgcctacatacctcgctctgctaatcctgttaccagtggctgctgccagtggcgataagtcgtgtcttaccgggttggactcaagacgatagttaccggataaggcgcagcggtcgggctgaacggggggttcgtgcacacagcccagcttggagcgaacgacctacaccgaactgagatacctacagcgtgagctatgagaaagcgccacgcttcccgaagggagaaaggcggacaggtatccggtaagcggcagggtcggaacaggagagcgcacgagggagcttccagggggaaacgcctggtatctttatagtcctgtcgggtttcgccacctctgacttgagcgtcgatttttgtgatgctcgtcaggggggcggagcctatggaaaaacgccagcaacgcggcctttttacggttcctggccttttgctggccttttgctcacatgttctttcctgcgttatcccctgattctgctagcttaagcggccgcgatcagaacacccgatactcacgttcgccctcttggccgcttgcatcgccatcttggcgggctgatgaagttaccgtagcagatactgaaattcctccggagctcgctcggcttcgggggttacaccgcgttagatgcaggacatcaacatccaggacccgccggaagctgttacagcggaatagcgccgtcttacgctgagacgcgctgacgtagcagcccccttcgaatagactccggggtaaaaccgagcctgagcgagactcgaggccggaagatggaaaggcgagagtccaagacacttccgggctctgtaccgtaaagggcggggcgtagcctccaaaaggcgagatgttccggtcggggaggccctgagcagaggaacccgggtggagagggcggggcctgaggagggcggagagctggggcgggtctcaggtgagtaactggggagcggaggaggcggggcttgagcagggttatgacaggtagggcgggacccaggtgagtagcgggagggggcggggcctgaggagggtgcggagagctggggtggggcccaagtgagtatccgggagggagccgggcctgagcaaggcggtgagctggggcgggacccaagtgagtaatggaaggggcggggcctgaggagggtggtggcggtggggcggggcccagatgtgtagcgggaggtggtggggcctgaggagggtggcgagaggtggggtggggcccaggtgagtagcgggcgaaggcggggcctgaggaggactgagctggggcgggacccaggtgagtagcggaagggatcggggcctgaggagggtggtggaggtgcggcggggcccagaagtgtagcaggaggtggttggggctgaggaaagtggtggaggtggggcggggctcagatgtgtagcgggaggtggtggggcctgaggagggcggcgagaggtggggtggggcccaggtgagtagcgggcagggctggggcctgctgtggtgcatctcgagagctcaagcttactagtgtggataaccgtattaccgccatgcat

SEQ ID NO: 43344 - DNA, 5389 bp, ARTIFICIAL SEQUENCE
  vector containing human replication origin
tagttattaatagtaatcaattacggggtcattagttcatagcccatatatggagttccgcgttacataacttacggtaaatggcccgcctggctgaccgcccaacgacccccgcccattgacgtcaataatgacgtatgttcccatagtaacgccaatagggactttccattgacgtcaatgggtggagtatttacggtaaactgcccacttggcagtacatcaagtgtatcatatgccaagtacgccccctattgacgtcaatgacggtaaatggcccgcctggcattatgcccagtacatgaccttatgggactttcctacttggcagtacatctacgtattagtcatcgctattaccatggtgatgcggttttggcagtacatcaatgggcgtggatagcggtttgactcacggggatttccaagtctccaccccattgacgtcaatgggagtttgttttggcaccaaaatcaacgggactttccaaaatgtcgtaacaactccgccccattgacgcaaatgggcggtaggcgtgtacggtgggaggtctatataagcagagctggtttagtgaaccgtcagatccgctagagcatgaccgagtacaagcccacggtgcgcctcgccacccgcgacgacgtcccccgggccgtacgcaccctcgccgccgcgttcgccgactaccccgccacgcgccacaccgtcgacccggaccgccacatcgagcgggtcaccgagctgcaagaactcttcctcacgcgcgtcgggctcgacatcggcaaggtgtgggtcgcggacgacggcgccgcggtggcggtctggaccacgccggagagcgtcgaagcgggggcggtgttcgccgagatcggcccgcgcatggccgagttgagcggttcccggctggccgcgcagcaacagatggaaggcctcctggcgccgcaccggcccaaggagcccgcgtggttcctggccaccgtcggcgtctcgcccgaccaccagggcaagggtctgggcagcgccgtcgtgctccccggagtggaggcggccgagcgcgccggggtgcccgccttcctggagacctccgcgccccgcaacctccccttctacgagcggctcggcttcaccgtcaccgccgacgtcgaggtgcccgaaggaccgcgcacctggtgcatgacccgcaagcccggtgcctagctgattggtctaaaatgagatacatcaacgctcctccatgttttttgttttctttttaaatgaaaaactttattttttaagaggagtttcaggttcatagcaaaattgagaggaaggtacattcaagctgaggaagttttcctctattcctagtttactgagagattgcatcatgaatgggtgttaaattttgtcaaatgctttttctgtgtctatcaatatgaccatgtgattttcttctttaacctgttgatgggacaaattacgttaattgattttcaaacgttgaaccacccttacatatctggaataaattctacttggttgtggtgtatattttttgatacattcttggattctttttgctaatattttgttgaaaatgtttgtatctttgttcatgagagatattggtctgttgttttcttttcttgtaatgtcattttctagttccggtattaaggtaatgctggcctagttgaatgatttaggaagtattccctctgcttctgtcttctgaaagagattgtagaaagttgatacaatttttttttctttaaatatttgatagaattctgcagtgaattctgcagtcgacggtaccgcgggcccgggatccaccggatctagataactgatcataatcagccataccacatttgtagaggttttacttgctttaaaaaacctcccacacctccccctgaacctgaaacataaaatgaatgcaattgttgttgttaacttgtttattgcagcttataatggttacaaataaagcaatagcatcacaaatttcacaaataaagcatttttttcactgcattctagttgtggtttgtccaaactcatcaatgtatcttaacgcgtaaattgtaagcgttaatattttgttaaaattcgcgttaaatttttgttaaatcagctcattttttaaccaataggccgaaatcggcgcggaacccctatttgtttatttttctaaatacattcaaatatgtatccgctcatgagacaataaccctgataaatgcttcaataatattgaaaaaggaagagtcaggatgaggatcgtttcgcatgattgaacaagatggattgcacgcaggttctccggccgcttgggtggagaggctattcggctatgactgggcacaacagacaatcggctgctctgatgccgccgtgttccggctgtcagcgcaggggcgcccggttctttttgtcaagaccgacctgtccggtgccctgaatgaactgcaagacgaggcagcgcggctatcgtggctggccacgacgggcgttccttgcgcagctgtgctcgacgttgtcactgaagcgggaagggactggctgctattgggcgaagtgccggggcaggatctcctgtcatctcaccttgctcctgccgagaaagtatccatcatggctgatgcaatgcggcggctgcatacgcttgatccggctacctgcccattcgaccaccaagcgaaacatcgcatcgagcgagcacgtactcggatggaagccggtcttgtcgatcaggatgatctggacgaagagcatcaggggctcgcgccagccgaactgttcgccaggctcaaggcgagcatgcccgacggcgaggatctcgtcgtgacccatggcgatgcctgcttgccgaatatcatggtggaaaatggccgcttttctggattcatcgactgtggccggctgggtgtggcggaccgctatcaggacatagcgttggctacccgtgatattgctgaagagcttggcggcgaatgggctgaccgcttcctcgtgctttacggtatcgccgctcccgattcgcagcgcatcgccttctatcgccttcttgacgagttcttctgagcgggactctggggttcgaaatgaccgaccaagcgacgcccaacctgccatcacgagatttcgattccaccgccgccttctatgaaaggttgggcttcggaatcgttttccgggacgccggctggatgatcctccagcgcggggatctcatgctggagttcttcgcccaccctagggggaggctaactgaaacacggaaggagacaataccggaaggaacccgcgctatgacggcaataaaaagacagaataaaacgcacggtgttgggtcgtttgttcataaacgcggggttcggtcccagggctggcactctgtcgataccccaccgagaccccattggggccaatacgcccgcgtttcttccttttccccaccccaccccccaagttcgggtgaaggcccagggctcgcagccaacgtcggggcggcaggccctgccatagcctcaggttactcatatatactttagattgatttaaaacttcatttttaatttaaaaggatctaggtgaagatcctttttgataatctcatgaccaaaatcccttaacgtgagttttcgttccactgagcgtcagaccccgtagaaaagatcaaaggatcttcttgagatcctttttttctgcgcgtaatctgctgcttgcaaacaaaaaaaccaccgctaccagcggtggtttgtttgccggatcaagagctaccaactctttttccgaaggtaactggcttcagcagagcgcagataccaaatactgtccttctagtgtagccgtagttaggccaccacttcaagaactctgtagcaccgcctacatacctcgctctgctaatcctgttaccagtggctgctgccagtggcgataagtcgtgtcttaccgggttggactcaagacgatagttaccggataaggcgcagcggtcgggctgaacggggggttcgtgcacacagcccagcttggagcgaacgacctacaccgaactgagatacctacagcgtgagctatgagaaagcgccacgcttcccgaagggagaaaggcggacaggtatccggtaagcggcagggtcggaacaggagagcgcacgagggagcttccagggggaaacgcctggtatctttatagtcctgtcgggtttcgccacctctgacttgagcgtcgatttttgtgatgctcgtcaggggggcggagcctatggaaaaacgccagcaacgcggcctttttacggttcctggccttttgctggccttttgctcacatgttctttcctgcgttatcccctgattctgctagcttaagcggccgcgattgcggcggcgcccccgctccccctcagccgcccacctcccgccgcgcgctcccccaacttcccgcccagcgcggctgacaccgcccagcccggcgcggggtccgagtcctgtcgccgccgccgccgcgtgcagttggggggttgggggtttgggggatgggggaggggccgccgccgcctcagcccgacgggccgggagaacaaagcggcggcggcggcggcgcgaactttttcggtgtctgttcagcgctccccgaggcgactacttacagtggcaggctcggcccgtcgtgagaaactgcgcccgccagcgtctgagtaccggacgaggcgccagcgaggcttcacgcgcctcgcaggatcccgcccgcctccggcgccccttcctccctccctccccgtcccgtcctggggccggagggcggggggccggggcgcgcggggggcgggggcgcgcggccagcgcggggcctgccgggagctgtagttcctcggcccgcgcccgccgggaggtggccgcggcgggaggtcggggttgtctctgccccgcgaaggggcgccgggagcgccgggtacagtcgggctggctccgcaccctcgagttccgggcgtcttcgtgagcgcgggggcacggggcaggggcgccgcgggagtcgcgagcgtgtctatcagttacacgcggtacttgatcgcgctgttgccgacggtactgtcttttcctctactgccgtgcactcttgagggaggcggtggcgacaatgggccagaggtgatagttggaacgggggacttgtaaggcgtccagagcagagagctgcttccaccctgagatgtcacagccctcccgcatgctcctccctgctgcctgcccccggggtggccgccggcaccgcagctcggcgcccaaaccggcacgtcccaagcccgacgttccggtgactgcaggggttttcccggtgcatctcgagagctcaagcttactagtgtggataaccgtattaccgccatgcat

SEQ ID NO: 43345 - DNA, 5399 bp, ARTIFICIAL SEQUENCE
  vector containing human replication origin
tagttattaatagtaatcaattacggggtcattagttcatagcccatatatggagttccgcgttacataacttacggtaaatggcccgcctggctgaccgcccaacgacccccgcccattgacgtcaataatgacgtatgttcccatagtaacgccaatagggactttccattgacgtcaatgggtggagtatttacggtaaactgcccacttggcagtacatcaagtgtatcatatgccaagtacgccccctattgacgtcaatgacggtaaatggcccgcctggcattatgcccagtacatgaccttatgggactttcctacttggcagtacatctacgtattagtcatcgctattaccatggtgatgcggttttggcagtacatcaatgggcgtggatagcggtttgactcacggggatttccaagtctccaccccattgacgtcaatgggagtttgttttggcaccaaaatcaacgggactttccaaaatgtcgtaacaactccgccccattgacgcaaatgggcggtaggcgtgtacggtgggaggtctatataagcagagctggtttagtgaaccgtcagatccgctagagcatgaccgagtacaagcccacggtgcgcctcgccacccgcgacgacgtcccccgggccgtacgcaccctcgccgccgcgttcgccgactaccccgccacgcgccacaccgtcgacccggaccgccacatcgagcgggtcaccgagctgcaagaactcttcctcacgcgcgtcgggctcgacatcggcaaggtgtgggtcgcggacgacggcgccgcggtggcggtctggaccacgccggagagcgtcgaagcgggggcggtgttcgccgagatcggcccgcgcatggccgagttgagcggttcccggctggccgcgcagcaacagatggaaggcctcctggcgccgcaccggcccaaggagcccgcgtggttcctggccaccgtcggcgtctcgcccgaccaccagggcaagggtctgggcagcgccgtcgtgctccccggagtggaggcggccgagcgcgccggggtgcccgccttcctggagacctccgcgccccgcaacctccccttctacgagcggctcggcttcaccgtcaccgccgacgtcgaggtgcccgaaggaccgcgcacctggtgcatgacccgcaagcccggtgcctagctgattggtctaaaatgagatacatcaacgctcctccatgttttttgttttctttttaaatgaaaaactttattttttaagaggagtttcaggttcatagcaaaattgagaggaaggtacattcaagctgaggaagttttcctctattcctagtttactgagagattgcatcatgaatgggtgttaaattttgtcaaatgctttttctgtgtctatcaatatgaccatgtgattttcttctttaacctgttgatgggacaaattacgttaattgattttcaaacgttgaaccacccttacatatctggaataaattctacttggttgtggtgtatattttttgatacattcttggattctttttgctaatattttgttgaaaatgtttgtatctttgttcatgagagatattggtctgttgttttcttttcttgtaatgtcattttctagttccggtattaaggtaatgctggcctagttgaatgatttaggaagtattccctctgcttctgtcttctgaaagagattgtagaaagttgatacaatttttttttctttaaatatttgatagaattctgcagtgaattctgcagtcgacggtaccgcgggcccgggatccaccggatctagataactgatcataatcagccataccacatttgtagaggttttacttgctttaaaaaacctcccacacctccccctgaacctgaaacataaaatgaatgcaattgttgttgttaacttgtttattgcagcttataatggttacaaataaagcaatagcatcacaaatttcacaaataaagcatttttttcactgcattctagttgtggtttgtccaaactcatcaatgtatcttaacgcgtaaattgtaagcgttaatattttgttaaaattcgcgttaaatttttgttaaatcagctcattttttaaccaataggccgaaatcggcgcggaacccctatttgtttatttttctaaatacattcaaatatgtatccgctcatgagacaataaccctgataaatgcttcaataatattgaaaaaggaagagtcaggatgaggatcgtttcgcatgattgaacaagatggattgcacgcaggttctccggccgcttgggtggagaggctattcggctatgactgggcacaacagacaatcggctgctctgatgccgccgtgttccggctgtcagcgcaggggcgcccggttctttttgtcaagaccgacctgtccggtgccctgaatgaactgcaagacgaggcagcgcggctatcgtggctggccacgacgggcgttccttgcgcagctgtgctcgacgttgtcactgaagcgggaagggactggctgctattgggcgaagtgccggggcaggatctcctgtcatctcaccttgctcctgccgagaaagtatccatcatggctgatgcaatgcggcggctgcatacgcttgatccggctacctgcccattcgaccaccaagcgaaacatcgcatcgagcgagcacgtactcggatggaagccggtcttgtcgatcaggatgatctggacgaagagcatcaggggctcgcgccagccgaactgttcgccaggctcaaggcgagcatgcccgacggcgaggatctcgtcgtgacccatggcgatgcctgcttgccgaatatcatggtggaaaatggccgcttttctggattcatcgactgtggccggctgggtgtggcggaccgctatcaggacatagcgttggctacccgtgatattgctgaagagcttggcggcgaatgggctgaccgcttcctcgtgctttacggtatcgccgctcccgattcgcagcgcatcgccttctatcgccttcttgacgagttcttctgagcgggactctggggttcgaaatgaccgaccaagcgacgcccaacctgccatcacgagatttcgattccaccgccgccttctatgaaaggttgggcttcggaatcgttttccgggacgccggctggatgatcctccagcgcggggatctcatgctggagttcttcgcccaccctagggggaggctaactgaaacacggaaggagacaataccggaaggaacccgcgctatgacggcaataaaaagacagaataaaacgcacggtgttgggtcgtttgttcataaacgcggggttcggtcccagggctggcactctgtcgataccccaccgagaccccattggggccaatacgcccgcgtttcttccttttccccaccccaccccccaagttcgggtgaaggcccagggctcgcagccaacgtcggggcggcaggccctgccatagcctcaggttactcatatatactttagattgatttaaaacttcatttttaatttaaaaggatctaggtgaagatcctttttgataatctcatgaccaaaatcccttaacgtgagttttcgttccactgagcgtcagaccccgtagaaaagatcaaaggatcttcttgagatcctttttttctgcgcgtaatctgctgcttgcaaacaaaaaaaccaccgctaccagcggtggtttgtttgccggatcaagagctaccaactctttttccgaaggtaactggcttcagcagagcgcagataccaaatactgtccttctagtgtagccgtagttaggccaccacttcaagaactctgtagcaccgcctacatacctcgctctgctaatcctgttaccagtggctgctgccagtggcgataagtcgtgtcttaccgggttggactcaagacgatagttaccggataaggcgcagcggtcgggctgaacggggggttcgtgcacacagcccagcttggagcgaacgacctacaccgaactgagatacctacagcgtgagctatgagaaagcgccacgcttcccgaagggagaaaggcggacaggtatccggtaagcggcagggtcggaacaggagagcgcacgagggagcttccagggggaaacgcctggtatctttatagtcctgtcgggtttcgccacctctgacttgagcgtcgatttttgtgatgctcgtcaggggggcggagcctatggaaaaacgccagcaacgcggcctttttacggttcctggccttttgctggccttttgctcacatgttctttcctgcgttatcccctgattctgctagcttaagcggccgcgatcgtgccgccgggggagggggcgccgctgcggggcgtgggagcccggagggcgcgggctgcggcctcttctagcagcccccgggcccggcaggtgcgcgcggggaggcaggcgccgggcgaggttgtctgggccctggtccgagggctgttcccgaccccgcctcggcccccaccctcagccggccgacttgcggagaggccggcgtccagtccctcacccagacaggcctctcccagagacactggcgcgctcggaggggatgcgctcaaagggtcccgcccaggcgggtcggcactcggcctcccacacagagaccctcggcttcacacctgcacccacagagaagctcaaacaggcacccacacctacacattcactctgcaacatgccccgcagacacccggacagatacacccacagacccaccccctcacagatgcggggacagacacgtccacggacacacgcagactcacgcagagacctgcaaacacactcagggaggtaggcaggacatccctggtgcccggcctccctcacggggagactctcagatgccacaaaaccccacgaagttcaggtaggcatacacagtctcatgcattcacacttaccaaagacaccccagaattcatacacacattcatacactcagatgaacacacaagcccagacccagcacacactctgtgtcgcctccccctgtgatcatctcagcactgtcaaacactctgactgacacggccagatgcacacaccttcaccctcagacacactagagtagcacacacacgccaagacacagccacacagactccatccctcccagtgtgggtgcatcccgacggattgactgacaccctcagactcaggtacactgagacacacttggcaggctcacactcacagactctcccattatcaccctcggcgacccgcagtcctcagacacacacgggctcagacactatctcgagagctcaagcttactagtgtggataaccgtattaccgccatgcat

SEQ ID NO: 43346 - DNA, 5429 bp, ARTIFICIAL SEQUENCE
  vector containing human replication origin
tagttattaatagtaatcaattacggggtcattagttcatagcccatatatggagttccgcgttacataacttacggtaaatggcccgcctggctgaccgcccaacgacccccgcccattgacgtcaataatgacgtatgttcccatagtaacgccaatagggactttccattgacgtcaatgggtggagtatttacggtaaactgcccacttggcagtacatcaagtgtatcatatgccaagtacgccccctattgacgtcaatgacggtaaatggcccgcctggcattatgcccagtacatgaccttatgggactttcctacttggcagtacatctacgtattagtcatcgctattaccatggtgatgcggttttggcagtacatcaatgggcgtggatagcggtttgactcacggggatttccaagtctccaccccattgacgtcaatgggagtttgttttggcaccaaaatcaacgggactttccaaaatgtcgtaacaactccgccccattgacgcaaatgggcggtaggcgtgtacggtgggaggtctatataagcagagctggtttagtgaaccgtcagatccgctagagcatgaccgagtacaagcccacggtgcgcctcgccacccgcgacgacgtcccccgggccgtacgcaccctcgccgccgcgttcgccgactaccccgccacgcgccacaccgtcgacccggaccgccacatcgagcgggtcaccgagctgcaagaactcttcctcacgcgcgtcgggctcgacatcggcaaggtgtgggtcgcggacgacggcgccgcggtggcggtctggaccacgccggagagcgtcgaagcgggggcggtgttcgccgagatcggcccgcgcatggccgagttgagcggttcccggctggccgcgcagcaacagatggaaggcctcctggcgccgcaccggcccaaggagcccgcgtggttcctggccaccgtcggcgtctcgcccgaccaccagggcaagggtctgggcagcgccgtcgtgctccccggagtggaggcggccgagcgcgccggggtgcccgccttcctggagacctccgcgccccgcaacctccccttctacgagcggctcggcttcaccgtcaccgccgacgtcgaggtgcccgaaggaccgcgcacctggtgcatgacccgcaagcccggtgcctagctgattggtctaaaatgagatacatcaacgctcctccatgttttttgttttctttttaaatgaaaaactttattttttaagaggagtttcaggttcatagcaaaattgagaggaaggtacattcaagctgaggaagttttcctctattcctagtttactgagagattgcatcatgaatgggtgttaaattttgtcaaatgctttttctgtgtctatcaatatgaccatgtgattttcttctttaacctgttgatgggacaaattacgttaattgattttcaaacgttgaaccacccttacatatctggaataaattctacttggttgtggtgtatattttttgatacattcttggattctttttgctaatattttgttgaaaatgtttgtatctttgttcatgagagatattggtctgttgttttcttttcttgtaatgtcattttctagttccggtattaaggtaatgctggcctagttgaatgatttaggaagtattccctctgcttctgtcttctgaaagagattgtagaaagttgatacaatttttttttctttaaatatttgatagaattctgcagtgaattctgcagtcgacggtaccgcgggcccgggatccaccggatctagataactgatcataatcagccataccacatttgtagaggttttacttgctttaaaaaacctcccacacctccccctgaacctgaaacataaaatgaatgcaattgttgttgttaacttgtttattgcagcttataatggttacaaataaagcaatagcatcacaaatttcacaaataaagcatttttttcactgcattctagttgtggtttgtccaaactcatcaatgtatcttaacgcgtaaattgtaagcgttaatattttgttaaaattcgcgttaaatttttgttaaatcagctcattttttaaccaataggccgaaatcggcgcggaacccctatttgtttatttttctaaatacattcaaatatgtatccgctcatgagacaataaccctgataaatgcttcaataatattgaaaaaggaagagtcaggatgaggatcgtttcgcatgattgaacaagatggattgcacgcaggttctccggccgcttgggtggagaggctattcggctatgactgggcacaacagacaatcggctgctctgatgccgccgtgttccggctgtcagcgcaggggcgcccggttctttttgtcaagaccgacctgtccggtgccctgaatgaactgcaagacgaggcagcgcggctatcgtggctggccacgacgggcgttccttgcgcagctgtgctcgacgttgtcactgaagcgggaagggactggctgctattgggcgaagtgccggggcaggatctcctgtcatctcaccttgctcctgccgagaaagtatccatcatggctgatgcaatgcggcggctgcatacgcttgatccggctacctgcccattcgaccaccaagcgaaacatcgcatcgagcgagcacgtactcggatggaagccggtcttgtcgatcaggatgatctggacgaagagcatcaggggctcgcgccagccgaactgttcgccaggctcaaggcgagcatgcccgacggcgaggatctcgtcgtgacccatggcgatgcctgcttgccgaatatcatggtggaaaatggccgcttttctggattcatcgactgtggccggctgggtgtggcggaccgctatcaggacatagcgttggctacccgtgatattgctgaagagcttggcggcgaatgggctgaccgcttcctcgtgctttacggtatcgccgctcccgattcgcagcgcatcgccttctatcgccttcttgacgagttcttctgagcgggactctggggttcgaaatgaccgaccaagcgacgcccaacctgccatcacgagatttcgattccaccgccgccttctatgaaaggttgggcttcggaatcgttttccgggacgccggctggatgatcctccagcgcggggatctcatgctggagttcttcgcccaccctagggggaggctaactgaaacacggaaggagacaataccggaaggaacccgcgctatgacggcaataaaaagacagaataaaacgcacggtgttgggtcgtttgttcataaacgcggggttcggtcccagggctggcactctgtcgataccccaccgagaccccattggggccaatacgcccgcgtttcttccttttccccaccccaccccccaagttcgggtgaaggcccagggctcgcagccaacgtcggggcggcaggccctgccatagcctcaggttactcatatatactttagattgatttaaaacttcatttttaatttaaaaggatctaggtgaagatcctttttgataatctcatgaccaaaatcccttaacgtgagttttcgttccactgagcgtcagaccccgtagaaaagatcaaaggatcttcttgagatcctttttttctgcgcgtaatctgctgcttgcaaacaaaaaaaccaccgctaccagcggtggtttgtttgccggatcaagagctaccaactctttttccgaaggtaactggcttcagcagagcgcagataccaaatactgtccttctagtgtagccgtagttaggccaccacttcaagaactctgtagcaccgcctacatacctcgctctgctaatcctgttaccagtggctgctgccagtggcgataagtcgtgtcttaccgggttggactcaagacgatagttaccggataaggcgcagcggtcgggctgaacggggggttcgtgcacacagcccagcttggagcgaacgacctacaccgaactgagatacctacagcgtgagctatgagaaagcgccacgcttcccgaagggagaaaggcggacaggtatccggtaagcggcagggtcggaacaggagagcgcacgagggagcttccagggggaaacgcctggtatctttatagtcctgtcgggtttcgccacctctgacttgagcgtcgatttttgtgatgctcgtcaggggggcggagcctatggaaaaacgccagcaacgcggcctttttacggttcctggccttttgctggccttttgctcacatgttctttcctgcgttatcccctgattctgctagcttaagcggccgcgatgcaaggggtgggttgggtgcactatcaggggctacactgcccagggcggggcgggtggggggggcgtgctatcctgggcttcactgcccatggcggggggctggctggggacgctgtcataggttgcattggggtggtagggggcgggttcggtgtggtattgggggctgcattgccagcagtgtgggggggggggtggttgggggcactgtcaggagcttgcgctgtcaagctagtagcaggttaggtgtgctattgggggctgcactgcccgaggtaggggggcggattaggtgcgctattgggggctaaactgcccacagctggcggggtttgggggctctgttggggggttgcagtgtcagaggcgggttaggggcattatcagctgctgcactacccgtggcaggaatcaggttgggggcactatcgggtgctgcaatgcctgtggtggggacgggttgtgggcattatcgggtgctacactgctggcggtggagtggttgggggtgctatcggggtcacactgtcagcggcgggggacaggttaggggtgctatcggatgctacactgtggtggagggcagggggtggggtgttgagagcgctatttgaggactacattgctggcagcggggggcggattaggggcactctcagggctgcactgccggcagcaggcagcagaggtggcagtgacagcagtggtctccacggaaaggacagtccttccctccctggactccaggctttacaaagcgattttctcctgcttaagtacagaggacatacagtgtttccgcaggaatactgagcacggcagggccccccacatctgctgtggttccctgggttacaccctctcgctctgtgttgtggatactgcctgggacccccaggcaccgagtaacgtgcaccacgtgggggacggtgctctctgggtggaggctcaggaatgagagcccgcacttgggtggggagagctggctgggtctgacttatctcgagagctcaagcttactagtgtggataaccgtattaccgccatgcat

SEQ ID NO: 43347 - DNA, 5409 bp, ARTIFICIAL SEQUENCE
  vector containing human replication origin
tagttattaatagtaatcaattacggggtcattagttcatagcccatatatggagttccgcgttacataacttacggtaaatggcccgcctggctgaccgcccaacgacccccgcccattgacgtcaataatgacgtatgttcccatagtaacgccaatagggactttccattgacgtcaatgggtggagtatttacggtaaactgcccacttggcagtacatcaagtgtatcatatgccaagtacgccccctattgacgtcaatgacggtaaatggcccgcctggcattatgcccagtacatgaccttatgggactttcctacttggcagtacatctacgtattagtcatcgctattaccatggtgatgcggttttggcagtacatcaatgggcgtggatagcggtttgactcacggggatttccaagtctccaccccattgacgtcaatgggagtttgttttggcaccaaaatcaacgggactttccaaaatgtcgtaacaactccgccccattgacgcaaatgggcggtaggcgtgtacggtgggaggtctatataagcagagctggtttagtgaaccgtcagatccgctagagcatgaccgagtacaagcccacggtgcgcctcgccacccgcgacgacgtcccccgggccgtacgcaccctcgccgccgcgttcgccgactaccccgccacgcgccacaccgtcgacccggaccgccacatcgagcgggtcaccgagctgcaagaactcttcctcacgcgcgtcgggctcgacatcggcaaggtgtgggtcgcggacgacggcgccgcggtggcggtctggaccacgccggagagcgtcgaagcgggggcggtgttcgccgagatcggcccgcgcatggccgagttgagcggttcccggctggccgcgcagcaacagatggaaggcctcctggcgccgcaccggcccaaggagcccgcgtggttcctggccaccgtcggcgtctcgcccgaccaccagggcaagggtctgggcagcgccgtcgtgctccccggagtggaggcggccgagcgcgccggggtgcccgccttcctggagacctccgcgccccgcaacctccccttctacgagcggctcggcttcaccgtcaccgccgacgtcgaggtgcccgaaggaccgcgcacctggtgcatgacccgcaagcccggtgcctagctgattggtctaaaatgagatacatcaacgctcctccatgttttttgttttctttttaaatgaaaaactttattttttaagaggagtttcaggttcatagcaaaattgagaggaaggtacattcaagctgaggaagttttcctctattcctagtttactgagagattgcatcatgaatgggtgttaaattttgtcaaatgctttttctgtgtctatcaatatgaccatgtgattttcttctttaacctgttgatgggacaaattacgttaattgattttcaaacgttgaaccacccttacatatctggaataaattctacttggttgtggtgtatattttttgatacattcttggattctttttgctaatattttgttgaaaatgtttgtatctttgttcatgagagatattggtctgttgttttcttttcttgtaatgtcattttctagttccggtattaaggtaatgctggcctagttgaatgatttaggaagtattccctctgcttctgtcttctgaaagagattgtagaaagttgatacaatttttttttctttaaatatttgatagaattctgcagtgaattctgcagtcgacggtaccgcgggcccgggatccaccggatctagataactgatcataatcagccataccacatttgtagaggttttacttgctttaaaaaacctcccacacctccccctgaacctgaaacataaaatgaatgcaattgttgttgttaacttgtttattgcagcttataatggttacaaataaagcaatagcatcacaaatttcacaaataaagcatttttttcactgcattctagttgtggtttgtccaaactcatcaatgtatcttaacgcgtaaattgtaagcgttaatattttgttaaaattcgcgttaaatttttgttaaatcagctcattttttaaccaataggccgaaatcggcgcggaacccctatttgtttatttttctaaatacattcaaatatgtatccgctcatgagacaataaccctgataaatgcttcaataatattgaaaaaggaagagtcaggatgaggatcgtttcgcatgattgaacaagatggattgcacgcaggttctccggccgcttgggtggagaggctattcggctatgactgggcacaacagacaatcggctgctctgatgccgccgtgttccggctgtcagcgcaggggcgcccggttctttttgtcaagaccgacctgtccggtgccctgaatgaactgcaagacgaggcagcgcggctatcgtggctggccacgacgggcgttccttgcgcagctgtgctcgacgttgtcactgaagcgggaagggactggctgctattgggcgaagtgccggggcaggatctcctgtcatctcaccttgctcctgccgagaaagtatccatcatggctgatgcaatgcggcggctgcatacgcttgatccggctacctgcccattcgaccaccaagcgaaacatcgcatcgagcgagcacgtactcggatggaagccggtcttgtcgatcaggatgatctggacgaagagcatcaggggctcgcgccagccgaactgttcgccaggctcaaggcgagcatgcccgacggcgaggatctcgtcgtgacccatggcgatgcctgcttgccgaatatcatggtggaaaatggccgcttttctggattcatcgactgtggccggctgggtgtggcggaccgctatcaggacatagcgttggctacccgtgatattgctgaagagcttggcggcgaatgggctgaccgcttcctcgtgctttacggtatcgccgctcccgattcgcagcgcatcgccttctatcgccttcttgacgagttcttctgagcgggactctggggttcgaaatgaccgaccaagcgacgcccaacctgccatcacgagatttcgattccaccgccgccttctatgaaaggttgggcttcggaatcgttttccgggacgccggctggatgatcctccagcgcggggatctcatgctggagttcttcgcccaccctagggggaggctaactgaaacacggaaggagacaataccggaaggaacccgcgctatgacggcaataaaaagacagaataaaacgcacggtgttgggtcgtttgttcataaacgcggggttcggtcccagggctggcactctgtcgataccccaccgagaccccattggggccaatacgcccgcgtttcttccttttccccaccccaccccccaagttcgggtgaaggcccagggctcgcagccaacgtcggggcggcaggccctgccatagcctcaggttactcatatatactttagattgatttaaaacttcatttttaatttaaaaggatctaggtgaagatcctttttgataatctcatgaccaaaatcccttaacgtgagttttcgttccactgagcgtcagaccccgtagaaaagatcaaaggatcttcttgagatcctttttttctgcgcgtaatctgctgcttgcaaacaaaaaaaccaccgctaccagcggtggtttgtttgccggatcaagagctaccaactctttttccgaaggtaactggcttcagcagagcgcagataccaaatactgtccttctagtgtagccgtagttaggccaccacttcaagaactctgtagcaccgcctacatacctcgctctgctaatcctgttaccagtggctgctgccagtggcgataagtcgtgtcttaccgggttggactcaagacgatagttaccggataaggcgcagcggtcgggctgaacggggggttcgtgcacacagcccagcttggagcgaacgacctacaccgaactgagatacctacagcgtgagctatgagaaagcgccacgcttcccgaagggagaaaggcggacaggtatccggtaagcggcagggtcggaacaggagagcgcacgagggagcttccagggggaaacgcctggtatctttatagtcctgtcgggtttcgccacctctgacttgagcgtcgatttttgtgatgctcgtcaggggggcggagcctatggaaaaacgccagcaacgcggcctttttacggttcctggccttttgctggccttttgctcacatgttctttcctgcgttatcccctgattctgctagcttaagcggccgcgattcccgaaataccctggcagcccccgcggccgcgccgttccagcccgcggcagcggcggcatccaaactccacaatattaccaccaccgcccgccgcgattggcggccgcgcgggggagaggccagagtaagccgagcgcccattggccacgccgccgcgctcgctggtgacccccccgcctaccgcgacgggaggggcatgcggaggaagccgcaagggtgggcgcggggccgcggctcgggcggggcgggggagtcggcaggggtgcgggccgggggagggcggccaggtgtcccggctcccaggcgctgccgcctcaggcgtggtaggcggagtccggggcggaggtggcgtggggaggtggggaacggcccgggactcgcacgtggaggtggagcgcggacgcctccctcagccagggcaagactaaggagctgggtgagggaccggaagggctggaaggggtgggcacctgggggctgcggcgagtggcgatgggcgagccggacttgcacgtggagaaagcgtgagaatgtgcccctgggtttggggagggtggggagccaaggagtgggatgagaggtggtcacggaatggggggcgctgctgtcctccccgggggctgcaggccgagaccgggtgaggggcgggggtgatgctggcactctggacggaagggcgtcgtcttcgcagccgaacaggttgtggacgcccaatcgtttttctgcccgtagtcccaatccgaagctaagctgtgtggttttcccttgaaagctccccagccaggcttgctgcctccacccctttcgcatctgaagcattttgcctcccactcgagagaaatcaattttcttaaacaaacaaaaaaaaagatgtgcaggatttctaataaatagcatccttggatggaggagaagaggaatgactccctcatcctgccacacacacccccacgccaccccgcagctctgaaacggcttatctcgagagctcaagcttactagtgtggataaccgtattaccgccatgcat

SEQ ID NO: 43348 - DNA, 5727 bp, ARTIFICIAL SEQUENCE
  vector containing human replication origin
tagttattaatagtaatcaattacggggtcattagttcatagcccatatatggagttccgcgttacataacttacggtaaatggcccgcctggctgaccgcccaacgacccccgcccattgacgtcaataatgacgtatgttcccatagtaacgccaatagggactttccattgacgtcaatgggtggagtatttacggtaaactgcccacttggcagtacatcaagtgtatcatatgccaagtacgccccctattgacgtcaatgacggtaaatggcccgcctggcattatgcccagtacatgaccttatgggactttcctacttggcagtacatctacgtattagtcatcgctattaccatggtgatgcggttttggcagtacatcaatgggcgtggatagcggtttgactcacggggatttccaagtctccaccccattgacgtcaatgggagtttgttttggcaccaaaatcaacgggactttccaaaatgtcgtaacaactccgccccattgacgcaaatgggcggtaggcgtgtacggtgggaggtctatataagcagagctggtttagtgaaccgtcagatccgctagagcatgaccgagtacaagcccacggtgcgcctcgccacccgcgacgacgtcccccgggccgtacgcaccctcgccgccgcgttcgccgactaccccgccacgcgccacaccgtcgacccggaccgccacatcgagcgggtcaccgagctgcaagaactcttcctcacgcgcgtcgggctcgacatcggcaaggtgtgggtcgcggacgacggcgccgcggtggcggtctggaccacgccggagagcgtcgaagcgggggcggtgttcgccgagatcggcccgcgcatggccgagttgagcggttcccggctggccgcgcagcaacagatggaaggcctcctggcgccgcaccggcccaaggagcccgcgtggttcctggccaccgtcggcgtctcgcccgaccaccagggcaagggtctgggcagcgccgtcgtgctccccggagtggaggcggccgagcgcgccggggtgcccgccttcctggagacctccgcgccccgcaacctccccttctacgagcggctcggcttcaccgtcaccgccgacgtcgaggtgcccgaaggaccgcgcacctggtgcatgacccgcaagcccggtgcctagctgattggtctaaaatgagatacatcaacgctcctccatgttttttgttttctttttaaatgaaaaactttattttttaagaggagtttcaggttcatagcaaaattgagaggaaggtacattcaagctgaggaagttttcctctattcctagtttactgagagattgcatcatgaatgggtgttaaattttgtcaaatgctttttctgtgtctatcaatatgaccatgtgattttcttctttaacctgttgatgggacaaattacgttaattgattttcaaacgttgaaccacccttacatatctggaataaattctacttggttgtggtgtatattttttgatacattcttggattctttttgctaatattttgttgaaaatgtttgtatctttgttcatgagagatattggtctgttgttttcttttcttgtaatgtcattttctagttccggtattaaggtaatgctggcctagttgaatgatttaggaagtattccctctgcttctgtcttctgaaagagattgtagaaagttgatacaatttttttttctttaaatatttgatagaattctgcagtgaattctgcagtcgacggtaccgcgggcccgggatccaccggatctagataactgatcataatcagccataccacatttgtagaggttttacttgctttaaaaaacctcccacacctccccctgaacctgaaacataaaatgaatgcaattgttgttgttaacttgtttattgcagcttataatggttacaaataaagcaatagcatcacaaatttcacaaataaagcatttttttcactgcattctagttgtggtttgtccaaactcatcaatgtatcttaacgcgtaaattgtaagcgttaatattttgttaaaattcgcgttaaatttttgttaaatcagctcattttttaaccaataggccgaaatcggcgcggaacccctatttgtttatttttctaaatacattcaaatatgtatccgctcatgagacaataaccctgataaatgcttcaataatattgaaaaaggaagagtcaggatgaggatcgtttcgcatgattgaacaagatggattgcacgcaggttctccggccgcttgggtggagaggctattcggctatgactgggcacaacagacaatcggctgctctgatgccgccgtgttccggctgtcagcgcaggggcgcccggttctttttgtcaagaccgacctgtccggtgccctgaatgaactgcaagacgaggcagcgcggctatcgtggctggccacgacgggcgttccttgcgcagctgtgctcgacgttgtcactgaagcgggaagggactggctgctattgggcgaagtgccggggcaggatctcctgtcatctcaccttgctcctgccgagaaagtatccatcatggctgatgcaatgcggcggctgcatacgcttgatccggctacctgcccattcgaccaccaagcgaaacatcgcatcgagcgagcacgtactcggatggaagccggtcttgtcgatcaggatgatctggacgaagagcatcaggggctcgcgccagccgaactgttcgccaggctcaaggcgagcatgcccgacggcgaggatctcgtcgtgacccatggcgatgcctgcttgccgaatatcatggtggaaaatggccgcttttctggattcatcgactgtggccggctgggtgtggcggaccgctatcaggacatagcgttggctacccgtgatattgctgaagagcttggcggcgaatgggctgaccgcttcctcgtgctttacggtatcgccgctcccgattcgcagcgcatcgccttctatcgccttcttgacgagttcttctgagcgggactctggggttcgaaatgaccgaccaagcgacgcccaacctgccatcacgagatttcgattccaccgccgccttctatgaaaggttgggcttcggaatcgttttccgggacgccggctggatgatcctccagcgcggggatctcatgctggagttcttcgcccaccctagggggaggctaactgaaacacggaaggagacaataccggaaggaacccgcgctatgacggcaataaaaagacagaataaaacgcacggtgttgggtcgtttgttcataaacgcggggttcggtcccagggctggcactctgtcgataccccaccgagaccccattggggccaatacgcccgcgtttcttccttttccccaccccaccccccaagttcgggtgaaggcccagggctcgcagccaacgtcggggcggcaggccctgccatagcctcaggttactcatatatactttagattgatttaaaacttcatttttaatttaaaaggatctaggtgaagatcctttttgataatctcatgaccaaaatcccttaacgtgagttttcgttccactgagcgtcagaccccgtagaaaagatcaaaggatcttcttgagatcctttttttctgcgcgtaatctgctgcttgcaaacaaaaaaaccaccgctaccagcggtggtttgtttgccggatcaagagctaccaactctttttccgaaggtaactggcttcagcagagcgcagataccaaatactgtccttctagtgtagccgtagttaggccaccacttcaagaactctgtagcaccgcctacatacctcgctctgctaatcctgttaccagtggctgctgccagtggcgataagtcgtgtcttaccgggttggactcaagacgatagttaccggataaggcgcagcggtcgggctgaacggggggttcgtgcacacagcccagcttggagcgaacgacctacaccgaactgagatacctacagcgtgagctatgagaaagcgccacgcttcccgaagggagaaaggcggacaggtatccggtaagcggcagggtcggaacaggagagcgcacgagggagcttccagggggaaacgcctggtatctttatagtcctgtcgggtttcgccacctctgacttgagcgtcgatttttgtgatgctcgtcaggggggcggagcctatggaaaaacgccagcaacgcggcctttttacggttcctggccttttgctggccttttgctcacatgttctttcctgcgttatcccctgattctgctagcttaagcggccgcgattcggcgctaggactccggggcggcggccgtgggaagggcggcgctaggaccccgcgggcccggcggcgcgtggggcggcgcgtgttgacagcggcggcggtggaaccgggcgggcggcgggagtcggcgcctcgggttcctacctcgcgtccctaggcggcggcggccgggcgtcccgggatggccttcatggagaagccgccagccggcaaggtgctgctggacgacacggtgccgctgacagcagccatcgaggcgagccagagcctgcagtcccacacggtgcgcggcccagcgggcgggcgggcggcgtggggcggccccgggccgcgagggggctgcgggctgcctggcgcgggccgggcagggtcgtcggacggagaccgggccacagggtgggcggccctggccgagaaggctgtggcgcgccgctgggtctgggtcagggcccctggggcccaggcgaacgctgaggcccggaggggccaaggatggggaccgcagctcccggcgccgcggggtggaaggagctcggcggcgaccaggaaagcgactccgagttggggggcgggggcgggggctgcgggattcccgggctcaccttggactaggggagcaggaacgagaccgctcaggaccatccacttctgcccgccgccagccttttcctttttgaggccgtgtaatttcctccttgcagctgagggtctgggtgatggggatgagggtgtgccgggccaaatgaagtgtgactccagagcctacttgttgggacagcagagtgtaagtggctggggtctgcagccccgtttccaggtcagccgcttggccctggtcccgggaagtggtgggggcggcagtcggggcgctgttaagcaggtgtatgaatgtgcttctctaacttgctctttagtgggcagtggtagcattcatttgagtttaaaatccactcgagtagcataaaggagtaataggtcctcatagtaaacattggcagggttcatttctgctacatatacggtcttttatggggctttaaaaccgtggttgttttcatttgcttgtacctttttttttttttgaaaggcccactatgcattataatttccaagcaataaatctaggaaccagcaagaaacctggagctatcagctagtgggacttttttggaaaagtaatgagtgaggagagagattccttcaattgtgatgttttgtcagtccaccgaatcagattcagactcagaggcttgtttgtttaccattgcagtgtgtttggggggtcatcatctggaggctatctcgagagctcaagcttactagtgtggataaccgtattaccgccatgcat

SEQ ID NO: 43349 - DNA, 5659 bp, ARTIFICIAL SEQUENCE
  vector containing human replication origin
tagttattaatagtaatcaattacggggtcattagttcatagcccatatatggagttccgcgttacataacttacggtaaatggcccgcctggctgaccgcccaacgacccccgcccattgacgtcaataatgacgtatgttcccatagtaacgccaatagggactttccattgacgtcaatgggtggagtatttacggtaaactgcccacttggcagtacatcaagtgtatcatatgccaagtacgccccctattgacgtcaatgacggtaaatggcccgcctggcattatgcccagtacatgaccttatgggactttcctacttggcagtacatctacgtattagtcatcgctattaccatggtgatgcggttttggcagtacatcaatgggcgtggatagcggtttgactcacggggatttccaagtctccaccccattgacgtcaatgggagtttgttttggcaccaaaatcaacgggactttccaaaatgtcgtaacaactccgccccattgacgcaaatgggcggtaggcgtgtacggtgggaggtctatataagcagagctggtttagtgaaccgtcagatccgctagagcatgaccgagtacaagcccacggtgcgcctcgccacccgcgacgacgtcccccgggccgtacgcaccctcgccgccgcgttcgccgactaccccgccacgcgccacaccgtcgacccggaccgccacatcgagcgggtcaccgagctgcaagaactcttcctcacgcgcgtcgggctcgacatcggcaaggtgtgggtcgcggacgacggcgccgcggtggcggtctggaccacgccggagagcgtcgaagcgggggcggtgttcgccgagatcggcccgcgcatggccgagttgagcggttcccggctggccgcgcagcaacagatggaaggcctcctggcgccgcaccggcccaaggagcccgcgtggttcctggccaccgtcggcgtctcgcccgaccaccagggcaagggtctgggcagcgccgtcgtgctccccggagtggaggcggccgagcgcgccggggtgcccgccttcctggagacctccgcgccccgcaacctccccttctacgagcggctcggcttcaccgtcaccgccgacgtcgaggtgcccgaaggaccgcgcacctggtgcatgacccgcaagcccggtgcctagctgattggtctaaaatgagatacatcaacgctcctccatgttttttgttttctttttaaatgaaaaactttattttttaagaggagtttcaggttcatagcaaaattgagaggaaggtacattcaagctgaggaagttttcctctattcctagtttactgagagattgcatcatgaatgggtgttaaattttgtcaaatgctttttctgtgtctatcaatatgaccatgtgattttcttctttaacctgttgatgggacaaattacgttaattgattttcaaacgttgaaccacccttacatatctggaataaattctacttggttgtggtgtatattttttgatacattcttggattctttttgctaatattttgttgaaaatgtttgtatctttgttcatgagagatattggtctgttgttttcttttcttgtaatgtcattttctagttccggtattaaggtaatgctggcctagttgaatgatttaggaagtattccctctgcttctgtcttctgaaagagattgtagaaagttgatacaatttttttttctttaaatatttgatagaattctgcagtgaattctgcagtcgacggtaccgcgggcccgggatccaccggatctagataactgatcataatcagccataccacatttgtagaggttttacttgctttaaaaaacctcccacacctccccctgaacctgaaacataaaatgaatgcaattgttgttgttaacttgtttattgcagcttataatggttacaaataaagcaatagcatcacaaatttcacaaataaagcatttttttcactgcattctagttgtggtttgtccaaactcatcaatgtatcttaacgcgtaaattgtaagcgttaatattttgttaaaattcgcgttaaatttttgttaaatcagctcattttttaaccaataggccgaaatcggcgcggaacccctatttgtttatttttctaaatacattcaaatatgtatccgctcatgagacaataaccctgataaatgcttcaataatattgaaaaaggaagagtcaggatgaggatcgtttcgcatgattgaacaagatggattgcacgcaggttctccggccgcttgggtggagaggctattcggctatgactgggcacaacagacaatcggctgctctgatgccgccgtgttccggctgtcagcgcaggggcgcccggttctttttgtcaagaccgacctgtccggtgccctgaatgaactgcaagacgaggcagcgcggctatcgtggctggccacgacgggcgttccttgcgcagctgtgctcgacgttgtcactgaagcgggaagggactggctgctattgggcgaagtgccggggcaggatctcctgtcatctcaccttgctcctgccgagaaagtatccatcatggctgatgcaatgcggcggctgcatacgcttgatccggctacctgcccattcgaccaccaagcgaaacatcgcatcgagcgagcacgtactcggatggaagccggtcttgtcgatcaggatgatctggacgaagagcatcaggggctcgcgccagccgaactgttcgccaggctcaaggcgagcatgcccgacggcgaggatctcgtcgtgacccatggcgatgcctgcttgccgaatatcatggtggaaaatggccgcttttctggattcatcgactgtggccggctgggtgtggcggaccgctatcaggacatagcgttggctacccgtgatattgctgaagagcttggcggcgaatgggctgaccgcttcctcgtgctttacggtatcgccgctcccgattcgcagcgcatcgccttctatcgccttcttgacgagttcttctgagcgggactctggggttcgaaatgaccgaccaagcgacgcccaacctgccatcacgagatttcgattccaccgccgccttctatgaaaggttgggcttcggaatcgttttccgggacgccggctggatgatcctccagcgcggggatctcatgctggagttcttcgcccaccctagggggaggctaactgaaacacggaaggagacaataccggaaggaacccgcgctatgacggcaataaaaagacagaataaaacgcacggtgttgggtcgtttgttcataaacgcggggttcggtcccagggctggcactctgtcgataccccaccgagaccccattggggccaatacgcccgcgtttcttccttttccccaccccaccccccaagttcgggtgaaggcccagggctcgcagccaacgtcggggcggcaggccctgccatagcctcaggttactcatatatactttagattgatttaaaacttcatttttaatttaaaaggatctaggtgaagatcctttttgataatctcatgaccaaaatcccttaacgtgagttttcgttccactgagcgtcagaccccgtagaaaagatcaaaggatcttcttgagatcctttttttctgcgcgtaatctgctgcttgcaaacaaaaaaaccaccgctaccagcggtggtttgtttgccggatcaagagctaccaactctttttccgaaggtaactggcttcagcagagcgcagataccaaatactgtccttctagtgtagccgtagttaggccaccacttcaagaactctgtagcaccgcctacatacctcgctctgctaatcctgttaccagtggctgctgccagtggcgataagtcgtgtcttaccgggttggactcaagacgatagttaccggataaggcgcagcggtcgggctgaacggggggttcgtgcacacagcccagcttggagcgaacgacctacaccgaactgagatacctacagcgtgagctatgagaaagcgccacgcttcccgaagggagaaaggcggacaggtatccggtaagcggcagggtcggaacaggagagcgcacgagggagcttccagggggaaacgcctggtatctttatagtcctgtcgggtttcgccacctctgacttgagcgtcgatttttgtgatgctcgtcaggggggcggagcctatggaaaaacgccagcaacgcggcctttttacggttcctggccttttgctggccttttgctcacatgttctttcctgcgttatcccctgattctgctagcttaagcggccgcgatggagagtgcagccgtgattggcgcgttcactcaggccaggggcgccccaggtctcaggtgctaggagcgcggtgacctaccaccctccgggcacgcgttctggccacgcctcgcggcccctttcattgaaagagcccgtagggatcacgtgaaagaacactgcagagtgcgtgacgtcacgacgctcacaccaatgggagcctctgtttatgtcgggagccatcaaatagtcatcttccccctaccatcccccgcccactctccgtcgcgctgcgctgcgtcgctttcagcctctggtgaagggcggcgcgcttaggcaggcggtggcgcggctggagtgccgcggggagggctgtgccggttgctttctgcagccgcatctcggccagctctcctcgccgtccccggggcgctgtgcgtctccagtccgggaccgaagccgcctgccgtagcgggcggccagatccgcgtcccgcctcagcggccggaggacatgcgggagagagaatgagccagagggacacgctggtgcatctgtttgccggagggtaaggtcctggcggggcgtgcgcactggggctgagggtgctggggccgaagacgcaggcgaggggggcgaggggggccgaggggggtgggggggtgggggggcgggagtgaggcctgggcggggagctgccacgggcctgcgggtgaggggagcgacccagcccgtgggtggtgaggggggctccggttcggggaagcaagggggtgaggcccgggcccgagggcgagagagtgaggcccgggcaaagagggttgaggcatgaaacccgggccgggagtgaggttttgggcccgcggggccggggtgaggcggaggccgaatccatgcgtctgaggagacgcgggcaagagctggggtcggcgcttgattacccggacgccgctggacctggccgcacgccgcaatctagcaggcgtcggggatccagggccgctttgaggagcctggcttcggatttcgcgtaggttgcatggcccaaggggacggggcggaaagtgcggaggctgaggacaaaatgggcgccggagactcctttagccctcgctccttgcagcgctcgcttgggcctctgcacgtcactcacgccccacctcggacctcgggccgctcatttccgggctcggctttgcaaggtgggtggtaagggggctacgggatcgagcggggaaggctttggtattatctcgagagctcaagcttactagtgtggataaccgtattaccgccatgcat

SEQ ID NO: 43350 - DNA, 5529 bp, ARTIFICIAL SEQUENCE
  vector containing human replication origin
tagttattaatagtaatcaattacggggtcattagttcatagcccatatatggagttccgcgttacataacttacggtaaatggcccgcctggctgaccgcccaacgacccccgcccattgacgtcaataatgacgtatgttcccatagtaacgccaatagggactttccattgacgtcaatgggtggagtatttacggtaaactgcccacttggcagtacatcaagtgtatcatatgccaagtacgccccctattgacgtcaatgacggtaaatggcccgcctggcattatgcccagtacatgaccttatgggactttcctacttggcagtacatctacgtattagtcatcgctattaccatggtgatgcggttttggcagtacatcaatgggcgtggatagcggtttgactcacggggatttccaagtctccaccccattgacgtcaatgggagtttgttttggcaccaaaatcaacgggactttccaaaatgtcgtaacaactccgccccattgacgcaaatgggcggtaggcgtgtacggtgggaggtctatataagcagagctggtttagtgaaccgtcagatccgctagagcatgaccgagtacaagcccacggtgcgcctcgccacccgcgacgacgtcccccgggccgtacgcaccctcgccgccgcgttcgccgactaccccgccacgcgccacaccgtcgacccggaccgccacatcgagcgggtcaccgagctgcaagaactcttcctcacgcgcgtcgggctcgacatcggcaaggtgtgggtcgcggacgacggcgccgcggtggcggtctggaccacgccggagagcgtcgaagcgggggcggtgttcgccgagatcggcccgcgcatggccgagttgagcggttcccggctggccgcgcagcaacagatggaaggcctcctggcgccgcaccggcccaaggagcccgcgtggttcctggccaccgtcggcgtctcgcccgaccaccagggcaagggtctgggcagcgccgtcgtgctccccggagtggaggcggccgagcgcgccggggtgcccgccttcctggagacctccgcgccccgcaacctccccttctacgagcggctcggcttcaccgtcaccgccgacgtcgaggtgcccgaaggaccgcgcacctggtgcatgacccgcaagcccggtgcctagctgattggtctaaaatgagatacatcaacgctcctccatgttttttgttttctttttaaatgaaaaactttattttttaagaggagtttcaggttcatagcaaaattgagaggaaggtacattcaagctgaggaagttttcctctattcctagtttactgagagattgcatcatgaatgggtgttaaattttgtcaaatgctttttctgtgtctatcaatatgaccatgtgattttcttctttaacctgttgatgggacaaattacgttaattgattttcaaacgttgaaccacccttacatatctggaataaattctacttggttgtggtgtatattttttgatacattcttggattctttttgctaatattttgttgaaaatgtttgtatctttgttcatgagagatattggtctgttgttttcttttcttgtaatgtcattttctagttccggtattaaggtaatgctggcctagttgaatgatttaggaagtattccctctgcttctgtcttctgaaagagattgtagaaagttgatacaatttttttttctttaaatatttgatagaattctgcagtgaattctgcagtcgacggtaccgcgggcccgggatccaccggatctagataactgatcataatcagccataccacatttgtagaggttttacttgctttaaaaaacctcccacacctccccctgaacctgaaacataaaatgaatgcaattgttgttgttaacttgtttattgcagcttataatggttacaaataaagcaatagcatcacaaatttcacaaataaagcatttttttcactgcattctagttgtggtttgtccaaactcatcaatgtatcttaacgcgtaaattgtaagcgttaatattttgttaaaattcgcgttaaatttttgttaaatcagctcattttttaaccaataggccgaaatcggcgcggaacccctatttgtttatttttctaaatacattcaaatatgtatccgctcatgagacaataaccctgataaatgcttcaataatattgaaaaaggaagagtcaggatgaggatcgtttcgcatgattgaacaagatggattgcacgcaggttctccggccgcttgggtggagaggctattcggctatgactgggcacaacagacaatcggctgctctgatgccgccgtgttccggctgtcagcgcaggggcgcccggttctttttgtcaagaccgacctgtccggtgccctgaatgaactgcaagacgaggcagcgcggctatcgtggctggccacgacgggcgttccttgcgcagctgtgctcgacgttgtcactgaagcgggaagggactggctgctattgggcgaagtgccggggcaggatctcctgtcatctcaccttgctcctgccgagaaagtatccatcatggctgatgcaatgcggcggctgcatacgcttgatccggctacctgcccattcgaccaccaagcgaaacatcgcatcgagcgagcacgtactcggatggaagccggtcttgtcgatcaggatgatctggacgaagagcatcaggggctcgcgccagccgaactgttcgccaggctcaaggcgagcatgcccgacggcgaggatctcgtcgtgacccatggcgatgcctgcttgccgaatatcatggtggaaaatggccgcttttctggattcatcgactgtggccggctgggtgtggcggaccgctatcaggacatagcgttggctacccgtgatattgctgaagagcttggcggcgaatgggctgaccgcttcctcgtgctttacggtatcgccgctcccgattcgcagcgcatcgccttctatcgccttcttgacgagttcttctgagcgggactctggggttcgaaatgaccgaccaagcgacgcccaacctgccatcacgagatttcgattccaccgccgccttctatgaaaggttgggcttcggaatcgttttccgggacgccggctggatgatcctccagcgcggggatctcatgctggagttcttcgcccaccctagggggaggctaactgaaacacggaaggagacaataccggaaggaacccgcgctatgacggcaataaaaagacagaataaaacgcacggtgttgggtcgtttgttcataaacgcggggttcggtcccagggctggcactctgtcgataccccaccgagaccccattggggccaatacgcccgcgtttcttccttttccccaccccaccccccaagttcgggtgaaggcccagggctcgcagccaacgtcggggcggcaggccctgccatagcctcaggttactcatatatactttagattgatttaaaacttcatttttaatttaaaaggatctaggtgaagatcctttttgataatctcatgaccaaaatcccttaacgtgagttttcgttccactgagcgtcagaccccgtagaaaagatcaaaggatcttcttgagatcctttttttctgcgcgtaatctgctgcttgcaaacaaaaaaaccaccgctaccagcggtggtttgtttgccggatcaagagctaccaactctttttccgaaggtaactggcttcagcagagcgcagataccaaatactgtccttctagtgtagccgtagttaggccaccacttcaagaactctgtagcaccgcctacatacctcgctctgctaatcctgttaccagtggctgctgccagtggcgataagtcgtgtcttaccgggttggactcaagacgatagttaccggataaggcgcagcggtcgggctgaacggggggttcgtgcacacagcccagcttggagcgaacgacctacaccgaactgagatacctacagcgtgagctatgagaaagcgccacgcttcccgaagggagaaaggcggacaggtatccggtaagcggcagggtcggaacaggagagcgcacgagggagcttccagggggaaacgcctggtatctttatagtcctgtcgggtttcgccacctctgacttgagcgtcgatttttgtgatgctcgtcaggggggcggagcctatggaaaaacgccagcaacgcggcctttttacggttcctggccttttgctggccttttgctcacatgttctttcctgcgttatcccctgattctgctagcttaagcggccgcgatggcgcgcagcgggcccggttttatgaatgggagagcgagccgcggccgccacatcaggtagaggctgtaactggatctctagcgctgggccccattcacaaaacaagacacacttccacccaattctcagccttccccattcatgaaaactccttcagctgcgcccccgcccccatttccaacgcacgcccagcctccgacgcaggcccctcaccccagcgttttaggaagaaagctcaatgcttcattcacaaaaagggaagaaaaaaaaaaaagccgcagggagcagcgagccaacgaaagaaacccgcttcattcataaagtcacccacattcataaaaacgaggtgcggcgcccggcgctaccaaccgcttccaatccccccacccccaacatctctccctggcaccccctcgtcgaccaggagttcggttcccccccgagttttctccaccctctgaaaatgcggccggaaccctaatccgctgcgaggctgcagcatctttcggtgctgtcccctccacacccgtgttatccccaccatccccaggccgctgttccggtgcgccccgattttctcgagtcgccgcacagccggacgccctcagcctgctgggtgggagcagggcgactggatgtccactttccaccacctgaaacttgcaaggcctgcgtaagttcctggtcgacccccgcccccgcaggctgcacttgcctgtgtcatttaccccctcccggtgctctggggggcagcgcctctcagacattcccctcaaactgcttcccgccccctcctcccaactgcggagctccgccaagcgtctcttctcgcgagcctccaagtcccctcggggctctcgaatctccagagactgtgaaagcctcgcaactccgcgatcccccatccactcgggagcccccgcactcgcgctccggggcgcctcccccacgacgtgtggaaagccgctctccccgcgctccggaaccgttagccgcacccgcccgacgcctcccaggaaccaaaccggaccgggccgcggggggagggggcggtcaacccggggggggtcaccccagctactgcaccccgactttgaagatctcgagagctcaagcttactagtgtggataaccgtattaccgccatgcat

SEQ ID NO: 43351 - DNA, 5769 bp, ARTIFICIAL SEQUENCE
  vector containing human replication origin
tagttattaatagtaatcaattacggggtcattagttcatagcccatatatggagttccgcgttacataacttacggtaaatggcccgcctggctgaccgcccaacgacccccgcccattgacgtcaataatgacgtatgttcccatagtaacgccaatagggactttccattgacgtcaatgggtggagtatttacggtaaactgcccacttggcagtacatcaagtgtatcatatgccaagtacgccccctattgacgtcaatgacggtaaatggcccgcctggcattatgcccagtacatgaccttatgggactttcctacttggcagtacatctacgtattagtcatcgctattaccatggtgatgcggttttggcagtacatcaatgggcgtggatagcggtttgactcacggggatttccaagtctccaccccattgacgtcaatgggagtttgttttggcaccaaaatcaacgggactttccaaaatgtcgtaacaactccgccccattgacgcaaatgggcggtaggcgtgtacggtgggaggtctatataagcagagctggtttagtgaaccgtcagatccgctagagcatgaccgagtacaagcccacggtgcgcctcgccacccgcgacgacgtcccccgggccgtacgcaccctcgccgccgcgttcgccgactaccccgccacgcgccacaccgtcgacccggaccgccacatcgagcgggtcaccgagctgcaagaactcttcctcacgcgcgtcgggctcgacatcggcaaggtgtgggtcgcggacgacggcgccgcggtggcggtctggaccacgccggagagcgtcgaagcgggggcggtgttcgccgagatcggcccgcgcatggccgagttgagcggttcccggctggccgcgcagcaacagatggaaggcctcctggcgccgcaccggcccaaggagcccgcgtggttcctggccaccgtcggcgtctcgcccgaccaccagggcaagggtctgggcagcgccgtcgtgctccccggagtggaggcggccgagcgcgccggggtgcccgccttcctggagacctccgcgccccgcaacctccccttctacgagcggctcggcttcaccgtcaccgccgacgtcgaggtgcccgaaggaccgcgcacctggtgcatgacccgcaagcccggtgcctagctgattggtctaaaatgagatacatcaacgctcctccatgttttttgttttctttttaaatgaaaaactttattttttaagaggagtttcaggttcatagcaaaattgagaggaaggtacattcaagctgaggaagttttcctctattcctagtttactgagagattgcatcatgaatgggtgttaaattttgtcaaatgctttttctgtgtctatcaatatgaccatgtgattttcttctttaacctgttgatgggacaaattacgttaattgattttcaaacgttgaaccacccttacatatctggaataaattctacttggttgtggtgtatattttttgatacattcttggattctttttgctaatattttgttgaaaatgtttgtatctttgttcatgagagatattggtctgttgttttcttttcttgtaatgtcattttctagttccggtattaaggtaatgctggcctagttgaatgatttaggaagtattccctctgcttctgtcttctgaaagagattgtagaaagttgatacaatttttttttctttaaatatttgatagaattctgcagtgaattctgcagtcgacggtaccgcgggcccgggatccaccggatctagataactgatcataatcagccataccacatttgtagaggttttacttgctttaaaaaacctcccacacctccccctgaacctgaaacataaaatgaatgcaattgttgttgttaacttgtttattgcagcttataatggttacaaataaagcaatagcatcacaaatttcacaaataaagcatttttttcactgcattctagttgtggtttgtccaaactcatcaatgtatcttaacgcgtaaattgtaagcgttaatattttgttaaaattcgcgttaaatttttgttaaatcagctcattttttaaccaataggccgaaatcggcgcggaacccctatttgtttatttttctaaatacattcaaatatgtatccgctcatgagacaataaccctgataaatgcttcaataatattgaaaaaggaagagtcaggatgaggatcgtttcgcatgattgaacaagatggattgcacgcaggttctccggccgcttgggtggagaggctattcggctatgactgggcacaacagacaatcggctgctctgatgccgccgtgttccggctgtcagcgcaggggcgcccggttctttttgtcaagaccgacctgtccggtgccctgaatgaactgcaagacgaggcagcgcggctatcgtggctggccacgacgggcgttccttgcgcagctgtgctcgacgttgtcactgaagcgggaagggactggctgctattgggcgaagtgccggggcaggatctcctgtcatctcaccttgctcctgccgagaaagtatccatcatggctgatgcaatgcggcggctgcatacgcttgatccggctacctgcccattcgaccaccaagcgaaacatcgcatcgagcgagcacgtactcggatggaagccggtcttgtcgatcaggatgatctggacgaagagcatcaggggctcgcgccagccgaactgttcgccaggctcaaggcgagcatgcccgacggcgaggatctcgtcgtgacccatggcgatgcctgcttgccgaatatcatggtggaaaatggccgcttttctggattcatcgactgtggccggctgggtgtggcggaccgctatcaggacatagcgttggctacccgtgatattgctgaagagcttggcggcgaatgggctgaccgcttcctcgtgctttacggtatcgccgctcccgattcgcagcgcatcgccttctatcgccttcttgacgagttcttctgagcgggactctggggttcgaaatgaccgaccaagcgacgcccaacctgccatcacgagatttcgattccaccgccgccttctatgaaaggttgggcttcggaatcgttttccgggacgccggctggatgatcctccagcgcggggatctcatgctggagttcttcgcccaccctagggggaggctaactgaaacacggaaggagacaataccggaaggaacccgcgctatgacggcaataaaaagacagaataaaacgcacggtgttgggtcgtttgttcataaacgcggggttcggtcccagggctggcactctgtcgataccccaccgagaccccattggggccaatacgcccgcgtttcttccttttccccaccccaccccccaagttcgggtgaaggcccagggctcgcagccaacgtcggggcggcaggccctgccatagcctcaggttactcatatatactttagattgatttaaaacttcatttttaatttaaaaggatctaggtgaagatcctttttgataatctcatgaccaaaatcccttaacgtgagttttcgttccactgagcgtcagaccccgtagaaaagatcaaaggatcttcttgagatcctttttttctgcgcgtaatctgctgcttgcaaacaaaaaaaccaccgctaccagcggtggtttgtttgccggatcaagagctaccaactctttttccgaaggtaactggcttcagcagagcgcagataccaaatactgtccttctagtgtagccgtagttaggccaccacttcaagaactctgtagcaccgcctacatacctcgctctgctaatcctgttaccagtggctgctgccagtggcgataagtcgtgtcttaccgggttggactcaagacgatagttaccggataaggcgcagcggtcgggctgaacggggggttcgtgcacacagcccagcttggagcgaacgacctacaccgaactgagatacctacagcgtgagctatgagaaagcgccacgcttcccgaagggagaaaggcggacaggtatccggtaagcggcagggtcggaacaggagagcgcacgagggagcttccagggggaaacgcctggtatctttatagtcctgtcgggtttcgccacctctgacttgagcgtcgatttttgtgatgctcgtcaggggggcggagcctatggaaaaacgccagcaacgcggcctttttacggttcctggccttttgctggccttttgctcacatgttctttcctgcgttatcccctgattctgctagcttaagcggccgcgatcactgcgccgccccccacccccacccccaccccaaataaaaacagagagacaatccttcaattataaagaagaccacggcgcccgggtctccggcaggggccgctgcagccgagcagaacgctgagccgctccgccccacggcctcctctccagccggcgcgcccgcctcccgcaggtgcgtctctgcctgcgccgggccggggtctccgcggcctctcccgctcgggctccggcttcgaggtcccgaccaagcactgctctcgcgggactgcgcgcaccgcccagggcctgccgcgggctcgcgagcggaggtggcaccggtccgcggtgcgcatgcgcggcccggcctctgccctgcggtcccgggctggtgactggctagcggttggaggaagggatgtgggggatggtgggtgggtacagagagctgggagggaggcaccccggggggcggggcgtgggagactgtattcgggggcgcgagctgccccaggtgagccgtggctcaggtccggagcgcggtcgggacacagcgcctctaggagaaagcctggaaggcgctccgggggtacccagagctcttagcgggccggcagcatgtgcggggcccaaggtcttccgggctctgcgtgggggtcgctgcggctggagaccagggagggggatggaaacggggttggaaagtaatcccacccgagcaggtgggcatgggaggccgctgtgctggggagccccgcgagggctccgaacagagcctcccttttcagaaaggtcaccctggtcattgcagctgccagggtgaccgaggaaggtggccggggtggaggcagtgggcgtggagaggggtcggattccggacgtagtttgaaggtggagccgtcaggttctgctgagcagcttggctatggggcgtgcgagaagggaaggctcagggcctagtccctgggcacgagtagtagccgggaggatgaagtcccagtgcttcggggggaggcggcttgaggacggctctggagctcaggcttgcccgcgtggagtggaagctgcctcttggacacagggcggggaggccgcatgcagtctggcgcgctgggaggatgggagatccagaggggcagggctggaggggtaggaggaaaacctgaagagggtggcgcccggaagcccgggaaagtgatgaactgggtcagaggccgggtatcaacaaataggagggtggagacgaccttgaggaaagcaggtgatggaacgggagggaatggggccccctagtggagacacctgggagtgatgtattgcatttatttagctcttaggcgttcaaaaattatttattgggatctcgagagctcaagcttactagtgtggataaccgtattaccgccatgcat

SEQ ID NO: 43352 - DNA, 5629 bp, ARTIFICIAL SEQUENCE
  vector containing human replication origin
tagttattaatagtaatcaattacggggtcattagttcatagcccatatatggagttccgcgttacataacttacggtaaatggcccgcctggctgaccgcccaacgacccccgcccattgacgtcaataatgacgtatgttcccatagtaacgccaatagggactttccattgacgtcaatgggtggagtatttacggtaaactgcccacttggcagtacatcaagtgtatcatatgccaagtacgccccctattgacgtcaatgacggtaaatggcccgcctggcattatgcccagtacatgaccttatgggactttcctacttggcagtacatctacgtattagtcatcgctattaccatggtgatgcggttttggcagtacatcaatgggcgtggatagcggtttgactcacggggatttccaagtctccaccccattgacgtcaatgggagtttgttttggcaccaaaatcaacgggactttccaaaatgtcgtaacaactccgccccattgacgcaaatgggcggtaggcgtgtacggtgggaggtctatataagcagagctggtttagtgaaccgtcagatccgctagagcatgaccgagtacaagcccacggtgcgcctcgccacccgcgacgacgtcccccgggccgtacgcaccctcgccgccgcgttcgccgactaccccgccacgcgccacaccgtcgacccggaccgccacatcgagcgggtcaccgagctgcaagaactcttcctcacgcgcgtcgggctcgacatcggcaaggtgtgggtcgcggacgacggcgccgcggtggcggtctggaccacgccggagagcgtcgaagcgggggcggtgttcgccgagatcggcccgcgcatggccgagttgagcggttcccggctggccgcgcagcaacagatggaaggcctcctggcgccgcaccggcccaaggagcccgcgtggttcctggccaccgtcggcgtctcgcccgaccaccagggcaagggtctgggcagcgccgtcgtgctccccggagtggaggcggccgagcgcgccggggtgcccgccttcctggagacctccgcgccccgcaacctccccttctacgagcggctcggcttcaccgtcaccgccgacgtcgaggtgcccgaaggaccgcgcacctggtgcatgacccgcaagcccggtgcctagctgattggtctaaaatgagatacatcaacgctcctccatgttttttgttttctttttaaatgaaaaactttattttttaagaggagtttcaggttcatagcaaaattgagaggaaggtacattcaagctgaggaagttttcctctattcctagtttactgagagattgcatcatgaatgggtgttaaattttgtcaaatgctttttctgtgtctatcaatatgaccatgtgattttcttctttaacctgttgatgggacaaattacgttaattgattttcaaacgttgaaccacccttacatatctggaataaattctacttggttgtggtgtatattttttgatacattcttggattctttttgctaatattttgttgaaaatgtttgtatctttgttcatgagagatattggtctgttgttttcttttcttgtaatgtcattttctagttccggtattaaggtaatgctggcctagttgaatgatttaggaagtattccctctgcttctgtcttctgaaagagattgtagaaagttgatacaatttttttttctttaaatatttgatagaattctgcagtgaattctgcagtcgacggtaccgcgggcccgggatccaccggatctagataactgatcataatcagccataccacatttgtagaggttttacttgctttaaaaaacctcccacacctccccctgaacctgaaacataaaatgaatgcaattgttgttgttaacttgtttattgcagcttataatggttacaaataaagcaatagcatcacaaatttcacaaataaagcatttttttcactgcattctagttgtggtttgtccaaactcatcaatgtatcttaacgcgtaaattgtaagcgttaatattttgttaaaattcgcgttaaatttttgttaaatcagctcattttttaaccaataggccgaaatcggcgcggaacccctatttgtttatttttctaaatacattcaaatatgtatccgctcatgagacaataaccctgataaatgcttcaataatattgaaaaaggaagagtcaggatgaggatcgtttcgcatgattgaacaagatggattgcacgcaggttctccggccgcttgggtggagaggctattcggctatgactgggcacaacagacaatcggctgctctgatgccgccgtgttccggctgtcagcgcaggggcgcccggttctttttgtcaagaccgacctgtccggtgccctgaatgaactgcaagacgaggcagcgcggctatcgtggctggccacgacgggcgttccttgcgcagctgtgctcgacgttgtcactgaagcgggaagggactggctgctattgggcgaagtgccggggcaggatctcctgtcatctcaccttgctcctgccgagaaagtatccatcatggctgatgcaatgcggcggctgcatacgcttgatccggctacctgcccattcgaccaccaagcgaaacatcgcatcgagcgagcacgtactcggatggaagccggtcttgtcgatcaggatgatctggacgaagagcatcaggggctcgcgccagccgaactgttcgccaggctcaaggcgagcatgcccgacggcgaggatctcgtcgtgacccatggcgatgcctgcttgccgaatatcatggtggaaaatggccgcttttctggattcatcgactgtggccggctgggtgtggcggaccgctatcaggacatagcgttggctacccgtgatattgctgaagagcttggcggcgaatgggctgaccgcttcctcgtgctttacggtatcgccgctcccgattcgcagcgcatcgccttctatcgccttcttgacgagttcttctgagcgggactctggggttcgaaatgaccgaccaagcgacgcccaacctgccatcacgagatttcgattccaccgccgccttctatgaaaggttgggcttcggaatcgttttccgggacgccggctggatgatcctccagcgcggggatctcatgctggagttcttcgcccaccctagggggaggctaactgaaacacggaaggagacaataccggaaggaacccgcgctatgacggcaataaaaagacagaataaaacgcacggtgttgggtcgtttgttcataaacgcggggttcggtcccagggctggcactctgtcgataccccaccgagaccccattggggccaatacgcccgcgtttcttccttttccccaccccaccccccaagttcgggtgaaggcccagggctcgcagccaacgtcggggcggcaggccctgccatagcctcaggttactcatatatactttagattgatttaaaacttcatttttaatttaaaaggatctaggtgaagatcctttttgataatctcatgaccaaaatcccttaacgtgagttttcgttccactgagcgtcagaccccgtagaaaagatcaaaggatcttcttgagatcctttttttctgcgcgtaatctgctgcttgcaaacaaaaaaaccaccgctaccagcggtggtttgtttgccggatcaagagctaccaactctttttccgaaggtaactggcttcagcagagcgcagataccaaatactgtccttctagtgtagccgtagttaggccaccacttcaagaactctgtagcaccgcctacatacctcgctctgctaatcctgttaccagtggctgctgccagtggcgataagtcgtgtcttaccgggttggactcaagacgatagttaccggataaggcgcagcggtcgggctgaacggggggttcgtgcacacagcccagcttggagcgaacgacctacaccgaactgagatacctacagcgtgagctatgagaaagcgccacgcttcccgaagggagaaaggcggacaggtatccggtaagcggcagggtcggaacaggagagcgcacgagggagcttccagggggaaacgcctggtatctttatagtcctgtcgggtttcgccacctctgacttgagcgtcgatttttgtgatgctcgtcaggggggcggagcctatggaaaaacgccagcaacgcggcctttttacggttcctggccttttgctggccttttgctcacatgttctttcctgcgttatcccctgattctgctagcttaagcggccgcgatttcaaatgatttgcatacattatgcaaataggtagaactgcccgaagaatgcctacgctgcgtggtgcggacgaaacgcttcccggggcctttggattggtctgtctagccacctcatttgcatgacgtaatataataactggaaggccccgcccctctggtgcatttccccgctccaaccacctcctcaaactcacggcaaagggatgcgagagctggaactcttaccaggcctgcggaaactcagccctccggcagctaatcccgcccgccagcccccgtcctctctctctttctccctagctgaaggcgccacgggccgtgtgtcgttgccttccacttttggcgtcccaacgtctctccgctcccatctttctactaacgtccgacgcacgctccgcctctttctcccacattcgtcgtgtaaattctgcgtcccaaccgcccagccgacctgcaccgcattcccgccccctcaacacggctcaacggccgacgctgggggcccgcctccttagccaatcggggtcctagtgcccttaagtccctcctctttatgcaaataacctccgcatgctccgcgcgcccggcccttttttttttttttttaaactaaagacagccctggaagtagagggttagggtagaaagtgccccgccctttatgcaaattaaggggcgtgtctaggcgcggagggaggtgggaggtgggagggggtgctcccgggggcggcggttgcccggatgggccgttagtcggggctcagccgcggagtgagcgagggagacgggaggagccgaacccggcgccatccgccgccatcctcccccgccccaccgccatcccgtcccggggagcccctaggcccgggtcccggatccccgcgcacccggccaggtgagtctgggtgaaccgtgcgctgacgcccttttccggcgcgggagaggtggtggcggtggcggtggcggcggcggcggcggtggtgggccggggggaggagaagctgccattagccgccgccattttgtcctcctgctgccgggcctgcttgcccctccccctccggtacctctactccgggacccgcacctccggcagttcattcaggatccgtagtctgcccctaaccacccaccgtcttggcttcagggggtgacccctgcgcctgggtccgtaactccctaccctccgctgcgctcatctcgagagctcaagcttactagtgtggataaccgtattaccgccatgcat

SEQ ID NO: 43353 - DNA, 6084 bp, ARTIFICIAL SEQUENCE
  vector containing human replication origin
tagttattaatagtaatcaattacggggtcattagttcatagcccatatatggagttccgcgttacataacttacggtaaatggcccgcctggctgaccgcccaacgacccccgcccattgacgtcaataatgacgtatgttcccatagtaacgccaatagggactttccattgacgtcaatgggtggagtatttacggtaaactgcccacttggcagtacatcaagtgtatcatatgccaagtacgccccctattgacgtcaatgacggtaaatggcccgcctggcattatgcccagtacatgaccttatgggactttcctacttggcagtacatctacgtattagtcatcgctattaccatggtgatgcggttttggcagtacatcaatgggcgtggatagcggtttgactcacggggatttccaagtctccaccccattgacgtcaatgggagtttgttttggcaccaaaatcaacgggactttccaaaatgtcgtaacaactccgccccattgacgcaaatgggcggtaggcgtgtacggtgggaggtctatataagcagagctggtttagtgaaccgtcagatccgctagagcatgaccgagtacaagcccacggtgcgcctcgccacccgcgacgacgtcccccgggccgtacgcaccctcgccgccgcgttcgccgactaccccgccacgcgccacaccgtcgacccggaccgccacatcgagcgggtcaccgagctgcaagaactcttcctcacgcgcgtcgggctcgacatcggcaaggtgtgggtcgcggacgacggcgccgcggtggcggtctggaccacgccggagagcgtcgaagcgggggcggtgttcgccgagatcggcccgcgcatggccgagttgagcggttcccggctggccgcgcagcaacagatggaaggcctcctggcgccgcaccggcccaaggagcccgcgtggttcctggccaccgtcggcgtctcgcccgaccaccagggcaagggtctgggcagcgccgtcgtgctccccggagtggaggcggccgagcgcgccggggtgcccgccttcctggagacctccgcgccccgcaacctccccttctacgagcggctcggcttcaccgtcaccgccgacgtcgaggtgcccgaaggaccgcgcacctggtgcatgacccgcaagcccggtgcctagctgattggtctaaaatgagatacatcaacgctcctccatgttttttgttttctttttaaatgaaaaactttattttttaagaggagtttcaggttcatagcaaaattgagaggaaggtacattcaagctgaggaagttttcctctattcctagtttactgagagattgcatcatgaatgggtgttaaattttgtcaaatgctttttctgtgtctatcaatatgaccatgtgattttcttctttaacctgttgatgggacaaattacgttaattgattttcaaacgttgaaccacccttacatatctggaataaattctacttggttgtggtgtatattttttgatacattcttggattctttttgctaatattttgttgaaaatgtttgtatctttgttcatgagagatattggtctgttgttttcttttcttgtaatgtcattttctagttccggtattaaggtaatgctggcctagttgaatgatttaggaagtattccctctgcttctgtcttctgaaagagattgtagaaagttgatacaatttttttttctttaaatatttgatagaattctgcagtgaattctgcagtcgacggtaccgcgggcccgggatccaccggatctagataactgatcataatcagccataccacatttgtagaggttttacttgctttaaaaaacctcccacacctccccctgaacctgaaacataaaatgaatgcaattgttgttgttaacttgtttattgcagcttataatggttacaaataaagcaatagcatcacaaatttcacaaataaagcatttttttcactgcattctagttgtggtttgtccaaactcatcaatgtatcttaacgcgtaaattgtaagcgttaatattttgttaaaattcgcgttaaatttttgttaaatcagctcattttttaaccaataggccgaaatcggcgcggaacccctatttgtttatttttctaaatacattcaaatatgtatccgctcatgagacaataaccctgataaatgcttcaataatattgaaaaaggaagagtcaggatgaggatcgtttcgcatgattgaacaagatggattgcacgcaggttctccggccgcttgggtggagaggctattcggctatgactgggcacaacagacaatcggctgctctgatgccgccgtgttccggctgtcagcgcaggggcgcccggttctttttgtcaagaccgacctgtccggtgccctgaatgaactgcaagacgaggcagcgcggctatcgtggctggccacgacgggcgttccttgcgcagctgtgctcgacgttgtcactgaagcgggaagggactggctgctattgggcgaagtgccggggcaggatctcctgtcatctcaccttgctcctgccgagaaagtatccatcatggctgatgcaatgcggcggctgcatacgcttgatccggctacctgcccattcgaccaccaagcgaaacatcgcatcgagcgagcacgtactcggatggaagccggtcttgtcgatcaggatgatctggacgaagagcatcaggggctcgcgccagccgaactgttcgccaggctcaaggcgagcatgcccgacggcgaggatctcgtcgtgacccatggcgatgcctgcttgccgaatatcatggtggaaaatggccgcttttctggattcatcgactgtggccggctgggtgtggcggaccgctatcaggacatagcgttggctacccgtgatattgctgaagagcttggcggcgaatgggctgaccgcttcctcgtgctttacggtatcgccgctcccgattcgcagcgcatcgccttctatcgccttcttgacgagttcttctgagcgggactctggggttcgaaatgaccgaccaagcgacgcccaacctgccatcacgagatttcgattccaccgccgccttctatgaaaggttgggcttcggaatcgttttccgggacgccggctggatgatcctccagcgcggggatctcatgctggagttcttcgcccaccctagggggaggctaactgaaacacggaaggagacaataccggaaggaacccgcgctatgacggcaataaaaagacagaataaaacgcacggtgttgggtcgtttgttcataaacgcggggttcggtcccagggctggcactctgtcgataccccaccgagaccccattggggccaatacgcccgcgtttcttccttttccccaccccaccccccaagttcgggtgaaggcccagggctcgcagccaacgtcggggcggcaggccctgccatagcctcaggttactcatatatactttagattgatttaaaacttcatttttaatttaaaaggatctaggtgaagatcctttttgataatctcatgaccaaaatcccttaacgtgagttttcgttccactgagcgtcagaccccgtagaaaagatcaaaggatcttcttgagatcctttttttctgcgcgtaatctgctgcttgcaaacaaaaaaaccaccgctaccagcggtggtttgtttgccggatcaagagctaccaactctttttccgaaggtaactggcttcagcagagcgcagataccaaatactgtccttctagtgtagccgtagttaggccaccacttcaagaactctgtagcaccgcctacatacctcgctctgctaatcctgttaccagtggctgctgccagtggcgataagtcgtgtcttaccgggttggactcaagacgatagttaccggataaggcgcagcggtcgggctgaacggggggttcgtgcacacagcccagcttggagcgaacgacctacaccgaactgagatacctacagcgtgagctatgagaaagcgccacgcttcccgaagggagaaaggcggacaggtatccggtaagcggcagggtcggaacaggagagcgcacgagggagcttccagggggaaacgcctggtatctttatagtcctgtcgggtttcgccacctctgacttgagcgtcgatttttgtgatgctcgtcaggggggcggagcctatggaaaaacgccagcaacgcggcctttttacggttcctggccttttgctggccttttgctcacatgttctttcctgcgttatcccctgattctgctagcttaagcggccgcgatcccgcccctgtcattgacatcttggcccggctaggacaggaaccccccttgctgggggaagaggggaatgactttgtggcatggcctagaaaacaggcaagcaaaaggcaagataagaaagaaggcaagagtcagaaatttcccaccaaccccccaggctacccagcctctcacccagcaggatccggcccccacggaggtccccatctccctcaagattctcagattcatccccaatgagtggtgtagcccctacaggggtgtcagccccctcatcaccaacagtgacagtgacagaggctggagatgaggggccagcaggctccagggagtcgggggtggccttgggcagggtttcttcactacgaggggtgtcccccaaagagccatgaactgtagaggaagagaaaaagttcagagctaagggctcaggagatcctgtgtttagggaaggtgacggtccaattggggcccgttttagctgcactcacctctctcggtggctcctctggtttccttctccagcagcagcgcccccatctcagcgggggcctccccctgggaggggagacaagggacaggagggctggtcagcccagtagagagttggggggtccaggatgcctgggccctgggaagagagagtaggctccggggcctacctcttcctctgtggggccccccccttccgcggcctcggctgcccggaggggccgcacgacccctcccccgggcccgcatcaaccccctccctctcggtagaccccgcatctctggggccgagagaagaggagggggagggggcggggcctccgcgccccggccccgccccctcctcccggctgcacgcgccgctccccctttgtcccccaggccgcggggaccccgggcaccaacccctccagcacccgctgccccccagcccggtggacggcccctcgtgcccctcacgcgtgctcctggggccccggcgcccgtcgcccactcaggggcagccggcggctgcacgcgcgcctccgtgcccactccccccacctcccacaccctggtcccctcatccgcccccggtgctggccccctggattgctgcaagtcccgcccgggccccccggccccgttgcacccccggagcattgcacgggcgcgcgcttcccccgggcgcgcgcgcgggcatgcacccgcctctccccctccccttccgcacctcggcggccgccgccgctgcagctcccgccgccgccgccatcgccgcttgcgctgggggccgagccggcgcgcggccgccccgggtcacgtgggcgagggagggagggcgaggaggagccttaaaggagccgctacatgctttttggccattttcccctgagagcggcctcggagatggctgtgactgtcctaagctgggagctgcaagggagaattcctgtcattcctggcctcagttctgcagggaccgagggcgagacacgcctgggcccaggtgtggcgtctctgtccccatctggttttaggtaacaagcggagcttctgaacttctcggctctcggcagcggctgtatttcctctggcctggttgggcttttcccgcctctggttgcttttctgcctttctagtttttgggttaccagatagaaggcttggcctcagttttggcatctcgagagctcaagcttactagtgtggataaccgtattaccgccatgcat

SEQ ID NO: 43354 - DNA, 5409 bp, ARTIFICIAL SEQUENCE
  vector containing human replication origin
tagttattaatagtaatcaattacggggtcattagttcatagcccatatatggagttccgcgttacataacttacggtaaatggcccgcctggctgaccgcccaacgacccccgcccattgacgtcaataatgacgtatgttcccatagtaacgccaatagggactttccattgacgtcaatgggtggagtatttacggtaaactgcccacttggcagtacatcaagtgtatcatatgccaagtacgccccctattgacgtcaatgacggtaaatggcccgcctggcattatgcccagtacatgaccttatgggactttcctacttggcagtacatctacgtattagtcatcgctattaccatggtgatgcggttttggcagtacatcaatgggcgtggatagcggtttgactcacggggatttccaagtctccaccccattgacgtcaatgggagtttgttttggcaccaaaatcaacgggactttccaaaatgtcgtaacaactccgccccattgacgcaaatgggcggtaggcgtgtacggtgggaggtctatataagcagagctggtttagtgaaccgtcagatccgctagagcatgaccgagtacaagcccacggtgcgcctcgccacccgcgacgacgtcccccgggccgtacgcaccctcgccgccgcgttcgccgactaccccgccacgcgccacaccgtcgacccggaccgccacatcgagcgggtcaccgagctgcaagaactcttcctcacgcgcgtcgggctcgacatcggcaaggtgtgggtcgcggacgacggcgccgcggtggcggtctggaccacgccggagagcgtcgaagcgggggcggtgttcgccgagatcggcccgcgcatggccgagttgagcggttcccggctggccgcgcagcaacagatggaaggcctcctggcgccgcaccggcccaaggagcccgcgtggttcctggccaccgtcggcgtctcgcccgaccaccagggcaagggtctgggcagcgccgtcgtgctccccggagtggaggcggccgagcgcgccggggtgcccgccttcctggagacctccgcgccccgcaacctccccttctacgagcggctcggcttcaccgtcaccgccgacgtcgaggtgcccgaaggaccgcgcacctggtgcatgacccgcaagcccggtgcctagctgattggtctaaaatgagatacatcaacgctcctccatgttttttgttttctttttaaatgaaaaactttattttttaagaggagtttcaggttcatagcaaaattgagaggaaggtacattcaagctgaggaagttttcctctattcctagtttactgagagattgcatcatgaatgggtgttaaattttgtcaaatgctttttctgtgtctatcaatatgaccatgtgattttcttctttaacctgttgatgggacaaattacgttaattgattttcaaacgttgaaccacccttacatatctggaataaattctacttggttgtggtgtatattttttgatacattcttggattctttttgctaatattttgttgaaaatgtttgtatctttgttcatgagagatattggtctgttgttttcttttcttgtaatgtcattttctagttccggtattaaggtaatgctggcctagttgaatgatttaggaagtattccctctgcttctgtcttctgaaagagattgtagaaagttgatacaatttttttttctttaaatatttgatagaattctgcagtgaattctgcagtcgacggtaccgcgggcccgggatccaccggatctagataactgatcataatcagccataccacatttgtagaggttttacttgctttaaaaaacctcccacacctccccctgaacctgaaacataaaatgaatgcaattgttgttgttaacttgtttattgcagcttataatggttacaaataaagcaatagcatcacaaatttcacaaataaagcatttttttcactgcattctagttgtggtttgtccaaactcatcaatgtatcttaacgcgtaaattgtaagcgttaatattttgttaaaattcgcgttaaatttttgttaaatcagctcattttttaaccaataggccgaaatcggcgcggaacccctatttgtttatttttctaaatacattcaaatatgtatccgctcatgagacaataaccctgataaatgcttcaataatattgaaaaaggaagagtcaggatgaggatcgtttcgcatgattgaacaagatggattgcacgcaggttctccggccgcttgggtggagaggctattcggctatgactgggcacaacagacaatcggctgctctgatgccgccgtgttccggctgtcagcgcaggggcgcccggttctttttgtcaagaccgacctgtccggtgccctgaatgaactgcaagacgaggcagcgcggctatcgtggctggccacgacgggcgttccttgcgcagctgtgctcgacgttgtcactgaagcgggaagggactggctgctattgggcgaagtgccggggcaggatctcctgtcatctcaccttgctcctgccgagaaagtatccatcatggctgatgcaatgcggcggctgcatacgcttgatccggctacctgcccattcgaccaccaagcgaaacatcgcatcgagcgagcacgtactcggatggaagccggtcttgtcgatcaggatgatctggacgaagagcatcaggggctcgcgccagccgaactgttcgccaggctcaaggcgagcatgcccgacggcgaggatctcgtcgtgacccatggcgatgcctgcttgccgaatatcatggtggaaaatggccgcttttctggattcatcgactgtggccggctgggtgtggcggaccgctatcaggacatagcgttggctacccgtgatattgctgaagagcttggcggcgaatgggctgaccgcttcctcgtgctttacggtatcgccgctcccgattcgcagcgcatcgccttctatcgccttcttgacgagttcttctgagcgggactctggggttcgaaatgaccgaccaagcgacgcccaacctgccatcacgagatttcgattccaccgccgccttctatgaaaggttgggcttcggaatcgttttccgggacgccggctggatgatcctccagcgcggggatctcatgctggagttcttcgcccaccctagggggaggctaactgaaacacggaaggagacaataccggaaggaacccgcgctatgacggcaataaaaagacagaataaaacgcacggtgttgggtcgtttgttcataaacgcggggttcggtcccagggctggcactctgtcgataccccaccgagaccccattggggccaatacgcccgcgtttcttccttttccccaccccaccccccaagttcgggtgaaggcccagggctcgcagccaacgtcggggcggcaggccctgccatagcctcaggttactcatatatactttagattgatttaaaacttcatttttaatttaaaaggatctaggtgaagatcctttttgataatctcatgaccaaaatcccttaacgtgagttttcgttccactgagcgtcagaccccgtagaaaagatcaaaggatcttcttgagatcctttttttctgcgcgtaatctgctgcttgcaaacaaaaaaaccaccgctaccagcggtggtttgtttgccggatcaagagctaccaactctttttccgaaggtaactggcttcagcagagcgcagataccaaatactgtccttctagtgtagccgtagttaggccaccacttcaagaactctgtagcaccgcctacatacctcgctctgctaatcctgttaccagtggctgctgccagtggcgataagtcgtgtcttaccgggttggactcaagacgatagttaccggataaggcgcagcggtcgggctgaacggggggttcgtgcacacagcccagcttggagcgaacgacctacaccgaactgagatacctacagcgtgagctatgagaaagcgccacgcttcccgaagggagaaaggcggacaggtatccggtaagcggcagggtcggaacaggagagcgcacgagggagcttccagggggaaacgcctggtatctttatagtcctgtcgggtttcgccacctctgacttgagcgtcgatttttgtgatgctcgtcaggggggcggagcctatggaaaaacgccagcaacgcggcctttttacggttcctggccttttgctggccttttgctcacatgttctttcctgcgttatcccctgattctgctagcttaagcggccgcgatgcaaattactttagaactccataggtatcttgaggataactgaaccttttcctaacttaaatcatagactgccagacggaaaaaaaatgtcctcgatgtttttagtctcttactgcacaatgtcaagatatcagctgggttatacaatagttgccctctgcatactcacaaatgttaactccagtccttttttgtcttccctccccgcctaagaagctaccaggtcacatgctggcggatacgcagtggcggaaacctagcggtgacagggaaggacagccctctgcctactgatctgcaggtttctcctccagtttgctcttacaccggggtcctccgctcggaccttagcccattcatttgatgattctctcccagttcgttcttccactgggtcccttgctcagcactacccaaaataaccaccagctcagcgccggctgcaccgccgctcccccgcccccgcccccgcccccgcccccgcccggtggggctgcacctgccgaggccccggctcggctccgcgatcacggtcgcggcccccggggttcccgaggggcttctgcgcaccgaggcaggcgggactgagcggcactctgaacgggctcccctcttaatgtcccctcgcgcctgagcagctccggtcccgccggcgcagggtgcgggtacccgggccatgccggcccagagaccgccgcccccggtaccgctgcccactcgaagcccctggacgaccccgccgcttaccggcttcggcccgtggggcgcccggtagaagaggcgtgcggtccgtgctctcctcgccatcgttccgggccaggtctcgaaccggagacctcatgacgcctacgtgagcaggtgtactcgccacctggcagagaagggagcgccggcccgacagcccgaagcccccgggccgagctggctggaccgggcggggcgggggcgatgacaccgccccgcggccacgtctagtccccatctcgagagctcaagcttactagtgtggataaccgtattaccgccatgcat

SEQ ID NO: 43355 - DNA, 5479 bp, ARTIFICIAL SEQUENCE
  vector containing human replication origin
tagttattaatagtaatcaattacggggtcattagttcatagcccatatatggagttccgcgttacataacttacggtaaatggcccgcctggctgaccgcccaacgacccccgcccattgacgtcaataatgacgtatgttcccatagtaacgccaatagggactttccattgacgtcaatgggtggagtatttacggtaaactgcccacttggcagtacatcaagtgtatcatatgccaagtacgccccctattgacgtcaatgacggtaaatggcccgcctggcattatgcccagtacatgaccttatgggactttcctacttggcagtacatctacgtattagtcatcgctattaccatggtgatgcggttttggcagtacatcaatgggcgtggatagcggtttgactcacggggatttccaagtctccaccccattgacgtcaatgggagtttgttttggcaccaaaatcaacgggactttccaaaatgtcgtaacaactccgccccattgacgcaaatgggcggtaggcgtgtacggtgggaggtctatataagcagagctggtttagtgaaccgtcagatccgctagagcatgaccgagtacaagcccacggtgcgcctcgccacccgcgacgacgtcccccgggccgtacgcaccctcgccgccgcgttcgccgactaccccgccacgcgccacaccgtcgacccggaccgccacatcgagcgggtcaccgagctgcaagaactcttcctcacgcgcgtcgggctcgacatcggcaaggtgtgggtcgcggacgacggcgccgcggtggcggtctggaccacgccggagagcgtcgaagcgggggcggtgttcgccgagatcggcccgcgcatggccgagttgagcggttcccggctggccgcgcagcaacagatggaaggcctcctggcgccgcaccggcccaaggagcccgcgtggttcctggccaccgtcggcgtctcgcccgaccaccagggcaagggtctgggcagcgccgtcgtgctccccggagtggaggcggccgagcgcgccggggtgcccgccttcctggagacctccgcgccccgcaacctccccttctacgagcggctcggcttcaccgtcaccgccgacgtcgaggtgcccgaaggaccgcgcacctggtgcatgacccgcaagcccggtgcctagctgattggtctaaaatgagatacatcaacgctcctccatgttttttgttttctttttaaatgaaaaactttattttttaagaggagtttcaggttcatagcaaaattgagaggaaggtacattcaagctgaggaagttttcctctattcctagtttactgagagattgcatcatgaatgggtgttaaattttgtcaaatgctttttctgtgtctatcaatatgaccatgtgattttcttctttaacctgttgatgggacaaattacgttaattgattttcaaacgttgaaccacccttacatatctggaataaattctacttggttgtggtgtatattttttgatacattcttggattctttttgctaatattttgttgaaaatgtttgtatctttgttcatgagagatattggtctgttgttttcttttcttgtaatgtcattttctagttccggtattaaggtaatgctggcctagttgaatgatttaggaagtattccctctgcttctgtcttctgaaagagattgtagaaagttgatacaatttttttttctttaaatatttgatagaattctgcagtgaattctgcagtcgacggtaccgcgggcccgggatccaccggatctagataactgatcataatcagccataccacatttgtagaggttttacttgctttaaaaaacctcccacacctccccctgaacctgaaacataaaatgaatgcaattgttgttgttaacttgtttattgcagcttataatggttacaaataaagcaatagcatcacaaatttcacaaataaagcatttttttcactgcattctagttgtggtttgtccaaactcatcaatgtatcttaacgcgtaaattgtaagcgttaatattttgttaaaattcgcgttaaatttttgttaaatcagctcattttttaaccaataggccgaaatcggcgcggaacccctatttgtttatttttctaaatacattcaaatatgtatccgctcatgagacaataaccctgataaatgcttcaataatattgaaaaaggaagagtcaggatgaggatcgtttcgcatgattgaacaagatggattgcacgcaggttctccggccgcttgggtggagaggctattcggctatgactgggcacaacagacaatcggctgctctgatgccgccgtgttccggctgtcagcgcaggggcgcccggttctttttgtcaagaccgacctgtccggtgccctgaatgaactgcaagacgaggcagcgcggctatcgtggctggccacgacgggcgttccttgcgcagctgtgctcgacgttgtcactgaagcgggaagggactggctgctattgggcgaagtgccggggcaggatctcctgtcatctcaccttgctcctgccgagaaagtatccatcatggctgatgcaatgcggcggctgcatacgcttgatccggctacctgcccattcgaccaccaagcgaaacatcgcatcgagcgagcacgtactcggatggaagccggtcttgtcgatcaggatgatctggacgaagagcatcaggggctcgcgccagccgaactgttcgccaggctcaaggcgagcatgcccgacggcgaggatctcgtcgtgacccatggcgatgcctgcttgccgaatatcatggtggaaaatggccgcttttctggattcatcgactgtggccggctgggtgtggcggaccgctatcaggacatagcgttggctacccgtgatattgctgaagagcttggcggcgaatgggctgaccgcttcctcgtgctttacggtatcgccgctcccgattcgcagcgcatcgccttctatcgccttcttgacgagttcttctgagcgggactctggggttcgaaatgaccgaccaagcgacgcccaacctgccatcacgagatttcgattccaccgccgccttctatgaaaggttgggcttcggaatcgttttccgggacgccggctggatgatcctccagcgcggggatctcatgctggagttcttcgcccaccctagggggaggctaactgaaacacggaaggagacaataccggaaggaacccgcgctatgacggcaataaaaagacagaataaaacgcacggtgttgggtcgtttgttcataaacgcggggttcggtcccagggctggcactctgtcgataccccaccgagaccccattggggccaatacgcccgcgtttcttccttttccccaccccaccccccaagttcgggtgaaggcccagggctcgcagccaacgtcggggcggcaggccctgccatagcctcaggttactcatatatactttagattgatttaaaacttcatttttaatttaaaaggatctaggtgaagatcctttttgataatctcatgaccaaaatcccttaacgtgagttttcgttccactgagcgtcagaccccgtagaaaagatcaaaggatcttcttgagatcctttttttctgcgcgtaatctgctgcttgcaaacaaaaaaaccaccgctaccagcggtggtttgtttgccggatcaagagctaccaactctttttccgaaggtaactggcttcagcagagcgcagataccaaatactgtccttctagtgtagccgtagttaggccaccacttcaagaactctgtagcaccgcctacatacctcgctctgctaatcctgttaccagtggctgctgccagtggcgataagtcgtgtcttaccgggttggactcaagacgatagttaccggataaggcgcagcggtcgggctgaacggggggttcgtgcacacagcccagcttggagcgaacgacctacaccgaactgagatacctacagcgtgagctatgagaaagcgccacgcttcccgaagggagaaaggcggacaggtatccggtaagcggcagggtcggaacaggagagcgcacgagggagcttccagggggaaacgcctggtatctttatagtcctgtcgggtttcgccacctctgacttgagcgtcgatttttgtgatgctcgtcaggggggcggagcctatggaaaaacgccagcaacgcggcctttttacggttcctggccttttgctggccttttgctcacatgttctttcctgcgttatcccctgattctgctagcttaagcggccgcgatggctgggcggccgggggcggccgggaacggcccctcggctacttaccgggaggaaggacagccgagatcccggggccccgggccggaccgcggagatgccccaaactgacacggccgccatcttggagacagtgagctccagccggggggaggggaggcaaggcggcggaacagccgcggggggaggggagcgtcgcgagggaacggcggcctgggggagggagctggaagagcctgggcgggcggcgaggggaggcggaggcccggcagcgcgggtggggggcggccgagagcgggaagagctgggccgagagccgggaaaggccggagggcggggcggggcagcagggaagagccggccggcggggtcacgtggggccggtacaaaaggccaaagccaggggaggaggaggacttggtggggctggaggctggggagcgggggttcctcctctcccgtctcacgcgtttaagtcagacggcgacccgggagaggaggagctggtgcaccccatgccaccgctggggaaactgagggcaggagtctgggtggggtggcttcagtgtggcacggaaatccggcagccacgcaggatgggaactctcggcggcgtctgtttacagttagtgagccctccctccccactcatttgcctgcacagcgactttccggagcccgagggcggggcctggggggcggagaggaggcggcttcccgtcctcacccctggcagctcgcctcagcccccgacggctctcctgtgtcggtgggaagagttggggagagggtggaaccagaagcacccgtcttaacccctttcagcagtgacttcatttcttccctcccccagcagctgagagggttcttggagctcactagagccattttatgggagactccacagacctgggtcgtgtgacttggacaaggtcacacagctagtatgtggcgcgcacctgagcctgggactgagatttgtcttattccaaagccggtcttcccttcttgccctgtgcggaactcttgtccatacttagggcgttggaaccatctcgagagctcaagcttactagtgtggataaccgtattaccgccatgcat

SEQ ID NO: 43356 - DNA, 5379 bp, ARTIFICIAL SEQUENCE
  vector containing human replication origin
tagttattaatagtaatcaattacggggtcattagttcatagcccatatatggagttccgcgttacataacttacggtaaatggcccgcctggctgaccgcccaacgacccccgcccattgacgtcaataatgacgtatgttcccatagtaacgccaatagggactttccattgacgtcaatgggtggagtatttacggtaaactgcccacttggcagtacatcaagtgtatcatatgccaagtacgccccctattgacgtcaatgacggtaaatggcccgcctggcattatgcccagtacatgaccttatgggactttcctacttggcagtacatctacgtattagtcatcgctattaccatggtgatgcggttttggcagtacatcaatgggcgtggatagcggtttgactcacggggatttccaagtctccaccccattgacgtcaatgggagtttgttttggcaccaaaatcaacgggactttccaaaatgtcgtaacaactccgccccattgacgcaaatgggcggtaggcgtgtacggtgggaggtctatataagcagagctggtttagtgaaccgtcagatccgctagagcatgaccgagtacaagcccacggtgcgcctcgccacccgcgacgacgtcccccgggccgtacgcaccctcgccgccgcgttcgccgactaccccgccacgcgccacaccgtcgacccggaccgccacatcgagcgggtcaccgagctgcaagaactcttcctcacgcgcgtcgggctcgacatcggcaaggtgtgggtcgcggacgacggcgccgcggtggcggtctggaccacgccggagagcgtcgaagcgggggcggtgttcgccgagatcggcccgcgcatggccgagttgagcggttcccggctggccgcgcagcaacagatggaaggcctcctggcgccgcaccggcccaaggagcccgcgtggttcctggccaccgtcggcgtctcgcccgaccaccagggcaagggtctgggcagcgccgtcgtgctccccggagtggaggcggccgagcgcgccggggtgcccgccttcctggagacctccgcgccccgcaacctccccttctacgagcggctcggcttcaccgtcaccgccgacgtcgaggtgcccgaaggaccgcgcacctggtgcatgacccgcaagcccggtgcctagctgattggtctaaaatgagatacatcaacgctcctccatgttttttgttttctttttaaatgaaaaactttattttttaagaggagtttcaggttcatagcaaaattgagaggaaggtacattcaagctgaggaagttttcctctattcctagtttactgagagattgcatcatgaatgggtgttaaattttgtcaaatgctttttctgtgtctatcaatatgaccatgtgattttcttctttaacctgttgatgggacaaattacgttaattgattttcaaacgttgaaccacccttacatatctggaataaattctacttggttgtggtgtatattttttgatacattcttggattctttttgctaatattttgttgaaaatgtttgtatctttgttcatgagagatattggtctgttgttttcttttcttgtaatgtcattttctagttccggtattaaggtaatgctggcctagttgaatgatttaggaagtattccctctgcttctgtcttctgaaagagattgtagaaagttgatacaatttttttttctttaaatatttgatagaattctgcagtgaattctgcagtcgacggtaccgcgggcccgggatccaccggatctagataactgatcataatcagccataccacatttgtagaggttttacttgctttaaaaaacctcccacacctccccctgaacctgaaacataaaatgaatgcaattgttgttgttaacttgtttattgcagcttataatggttacaaataaagcaatagcatcacaaatttcacaaataaagcatttttttcactgcattctagttgtggtttgtccaaactcatcaatgtatcttaacgcgtaaattgtaagcgttaatattttgttaaaattcgcgttaaatttttgttaaatcagctcattttttaaccaataggccgaaatcggcgcggaacccctatttgtttatttttctaaatacattcaaatatgtatccgctcatgagacaataaccctgataaatgcttcaataatattgaaaaaggaagagtcaggatgaggatcgtttcgcatgattgaacaagatggattgcacgcaggttctccggccgcttgggtggagaggctattcggctatgactgggcacaacagacaatcggctgctctgatgccgccgtgttccggctgtcagcgcaggggcgcccggttctttttgtcaagaccgacctgtccggtgccctgaatgaactgcaagacgaggcagcgcggctatcgtggctggccacgacgggcgttccttgcgcagctgtgctcgacgttgtcactgaagcgggaagggactggctgctattgggcgaagtgccggggcaggatctcctgtcatctcaccttgctcctgccgagaaagtatccatcatggctgatgcaatgcggcggctgcatacgcttgatccggctacctgcccattcgaccaccaagcgaaacatcgcatcgagcgagcacgtactcggatggaagccggtcttgtcgatcaggatgatctggacgaagagcatcaggggctcgcgccagccgaactgttcgccaggctcaaggcgagcatgcccgacggcgaggatctcgtcgtgacccatggcgatgcctgcttgccgaatatcatggtggaaaatggccgcttttctggattcatcgactgtggccggctgggtgtggcggaccgctatcaggacatagcgttggctacccgtgatattgctgaagagcttggcggcgaatgggctgaccgcttcctcgtgctttacggtatcgccgctcccgattcgcagcgcatcgccttctatcgccttcttgacgagttcttctgagcgggactctggggttcgaaatgaccgaccaagcgacgcccaacctgccatcacgagatttcgattccaccgccgccttctatgaaaggttgggcttcggaatcgttttccgggacgccggctggatgatcctccagcgcggggatctcatgctggagttcttcgcccaccctagggggaggctaactgaaacacggaaggagacaataccggaaggaacccgcgctatgacggcaataaaaagacagaataaaacgcacggtgttgggtcgtttgttcataaacgcggggttcggtcccagggctggcactctgtcgataccccaccgagaccccattggggccaatacgcccgcgtttcttccttttccccaccccaccccccaagttcgggtgaaggcccagggctcgcagccaacgtcggggcggcaggccctgccatagcctcaggttactcatatatactttagattgatttaaaacttcatttttaatttaaaaggatctaggtgaagatcctttttgataatctcatgaccaaaatcccttaacgtgagttttcgttccactgagcgtcagaccccgtagaaaagatcaaaggatcttcttgagatcctttttttctgcgcgtaatctgctgcttgcaaacaaaaaaaccaccgctaccagcggtggtttgtttgccggatcaagagctaccaactctttttccgaaggtaactggcttcagcagagcgcagataccaaatactgtccttctagtgtagccgtagttaggccaccacttcaagaactctgtagcaccgcctacatacctcgctctgctaatcctgttaccagtggctgctgccagtggcgataagtcgtgtcttaccgggttggactcaagacgatagttaccggataaggcgcagcggtcgggctgaacggggggttcgtgcacacagcccagcttggagcgaacgacctacaccgaactgagatacctacagcgtgagctatgagaaagcgccacgcttcccgaagggagaaaggcggacaggtatccggtaagcggcagggtcggaacaggagagcgcacgagggagcttccagggggaaacgcctggtatctttatagtcctgtcgggtttcgccacctctgacttgagcgtcgatttttgtgatgctcgtcaggggggcggagcctatggaaaaacgccagcaacgcggcctttttacggttcctggccttttgctggccttttgctcacatgttctttcctgcgttatcccctgattctgctagcttaagcggccgcgattagaagcagactcctccccgctcctggggaaaaccctgcctaatatttataacgttatgacatactgtaatactcacaaggtggttgtagaagtataaacacgactggagttatctgattggctgctggtgatgtaacacccatgtcaatacttcccagtgaacgcacgtgttcgaccttttatttaaatttccatttcatcacagcaataagacactcggggcggtgcattttctgtgaaatgactactgtccggggcccgaggtgctgcctcgcacaatgcatcaaaggaggttgtgtccgtggtcgtaacctcttcgcgtgaaaggcaccgcctggtccagtctttgtgaaggaacaaaataagttcacttccttgggcaccgccacccaccctcagcaaatgacaaggctggagcgcagctcccaccgcacagttatttgcaaagtcccaggtgaactcgtggcgagagaaggaaaatgcgcgtcccgggcgcgggtaggtgcgtgtgggcagcggggaggcggccagaccctgacactcgccagctgtttgtcctccgcgtagcccggccccggccgcacacgcccgccccctccctgagacccccagcccgccgcccggccttttgtccccaacccctcggccgacttccttccccgcggccgcacccccgcccccaggccggaggcgcagcccagcccctttcccggtcccctggcgcccccaccccaccccagcccagccccaagcccagcccccctcccccagcccggcccccaccctttccccctccagcggttactgctaccccggtgcattgtgggcgcacggtccgttgttcatttgccattcgacctccgccagggcctggtcggacggaaacgctccgccggctttattgtcgcttcgttatgtggcggagccgagcagtttagcgtgcctctcaatctcgagagctcaagcttactagtgtggataaccgtattaccgccatgcat

SEQ ID NO: 43357 - DNA, 5399 bp, ARTIFICIAL SEQUENCE
  vector containing human replication origin
tagttattaatagtaatcaattacggggtcattagttcatagcccatatatggagttccgcgttacataacttacggtaaatggcccgcctggctgaccgcccaacgacccccgcccattgacgtcaataatgacgtatgttcccatagtaacgccaatagggactttccattgacgtcaatgggtggagtatttacggtaaactgcccacttggcagtacatcaagtgtatcatatgccaagtacgccccctattgacgtcaatgacggtaaatggcccgcctggcattatgcccagtacatgaccttatgggactttcctacttggcagtacatctacgtattagtcatcgctattaccatggtgatgcggttttggcagtacatcaatgggcgtggatagcggtttgactcacggggatttccaagtctccaccccattgacgtcaatgggagtttgttttggcaccaaaatcaacgggactttccaaaatgtcgtaacaactccgccccattgacgcaaatgggcggtaggcgtgtacggtgggaggtctatataagcagagctggtttagtgaaccgtcagatccgctagagcatgaccgagtacaagcccacggtgcgcctcgccacccgcgacgacgtcccccgggccgtacgcaccctcgccgccgcgttcgccgactaccccgccacgcgccacaccgtcgacccggaccgccacatcgagcgggtcaccgagctgcaagaactcttcctcacgcgcgtcgggctcgacatcggcaaggtgtgggtcgcggacgacggcgccgcggtggcggtctggaccacgccggagagcgtcgaagcgggggcggtgttcgccgagatcggcccgcgcatggccgagttgagcggttcccggctggccgcgcagcaacagatggaaggcctcctggcgccgcaccggcccaaggagcccgcgtggttcctggccaccgtcggcgtctcgcccgaccaccagggcaagggtctgggcagcgccgtcgtgctccccggagtggaggcggccgagcgcgccggggtgcccgccttcctggagacctccgcgccccgcaacctccccttctacgagcggctcggcttcaccgtcaccgccgacgtcgaggtgcccgaaggaccgcgcacctggtgcatgacccgcaagcccggtgcctagctgattggtctaaaatgagatacatcaacgctcctccatgttttttgttttctttttaaatgaaaaactttattttttaagaggagtttcaggttcatagcaaaattgagaggaaggtacattcaagctgaggaagttttcctctattcctagtttactgagagattgcatcatgaatgggtgttaaattttgtcaaatgctttttctgtgtctatcaatatgaccatgtgattttcttctttaacctgttgatgggacaaattacgttaattgattttcaaacgttgaaccacccttacatatctggaataaattctacttggttgtggtgtatattttttgatacattcttggattctttttgctaatattttgttgaaaatgtttgtatctttgttcatgagagatattggtctgttgttttcttttcttgtaatgtcattttctagttccggtattaaggtaatgctggcctagttgaatgatttaggaagtattccctctgcttctgtcttctgaaagagattgtagaaagttgatacaatttttttttctttaaatatttgatagaattctgcagtgaattctgcagtcgacggtaccgcgggcccgggatccaccggatctagataactgatcataatcagccataccacatttgtagaggttttacttgctttaaaaaacctcccacacctccccctgaacctgaaacataaaatgaatgcaattgttgttgttaacttgtttattgcagcttataatggttacaaataaagcaatagcatcacaaatttcacaaataaagcatttttttcactgcattctagttgtggtttgtccaaactcatcaatgtatcttaacgcgtaaattgtaagcgttaatattttgttaaaattcgcgttaaatttttgttaaatcagctcattttttaaccaataggccgaaatcggcgcggaacccctatttgtttatttttctaaatacattcaaatatgtatccgctcatgagacaataaccctgataaatgcttcaataatattgaaaaaggaagagtcaggatgaggatcgtttcgcatgattgaacaagatggattgcacgcaggttctccggccgcttgggtggagaggctattcggctatgactgggcacaacagacaatcggctgctctgatgccgccgtgttccggctgtcagcgcaggggcgcccggttctttttgtcaagaccgacctgtccggtgccctgaatgaactgcaagacgaggcagcgcggctatcgtggctggccacgacgggcgttccttgcgcagctgtgctcgacgttgtcactgaagcgggaagggactggctgctattgggcgaagtgccggggcaggatctcctgtcatctcaccttgctcctgccgagaaagtatccatcatggctgatgcaatgcggcggctgcatacgcttgatccggctacctgcccattcgaccaccaagcgaaacatcgcatcgagcgagcacgtactcggatggaagccggtcttgtcgatcaggatgatctggacgaagagcatcaggggctcgcgccagccgaactgttcgccaggctcaaggcgagcatgcccgacggcgaggatctcgtcgtgacccatggcgatgcctgcttgccgaatatcatggtggaaaatggccgcttttctggattcatcgactgtggccggctgggtgtggcggaccgctatcaggacatagcgttggctacccgtgatattgctgaagagcttggcggcgaatgggctgaccgcttcctcgtgctttacggtatcgccgctcccgattcgcagcgcatcgccttctatcgccttcttgacgagttcttctgagcgggactctggggttcgaaatgaccgaccaagcgacgcccaacctgccatcacgagatttcgattccaccgccgccttctatgaaaggttgggcttcggaatcgttttccgggacgccggctggatgatcctccagcgcggggatctcatgctggagttcttcgcccaccctagggggaggctaactgaaacacggaaggagacaataccggaaggaacccgcgctatgacggcaataaaaagacagaataaaacgcacggtgttgggtcgtttgttcataaacgcggggttcggtcccagggctggcactctgtcgataccccaccgagaccccattggggccaatacgcccgcgtttcttccttttccccaccccaccccccaagttcgggtgaaggcccagggctcgcagccaacgtcggggcggcaggccctgccatagcctcaggttactcatatatactttagattgatttaaaacttcatttttaatttaaaaggatctaggtgaagatcctttttgataatctcatgaccaaaatcccttaacgtgagttttcgttccactgagcgtcagaccccgtagaaaagatcaaaggatcttcttgagatcctttttttctgcgcgtaatctgctgcttgcaaacaaaaaaaccaccgctaccagcggtggtttgtttgccggatcaagagctaccaactctttttccgaaggtaactggcttcagcagagcgcagataccaaatactgtccttctagtgtagccgtagttaggccaccacttcaagaactctgtagcaccgcctacatacctcgctctgctaatcctgttaccagtggctgctgccagtggcgataagtcgtgtcttaccgggttggactcaagacgatagttaccggataaggcgcagcggtcgggctgaacggggggttcgtgcacacagcccagcttggagcgaacgacctacaccgaactgagatacctacagcgtgagctatgagaaagcgccacgcttcccgaagggagaaaggcggacaggtatccggtaagcggcagggtcggaacaggagagcgcacgagggagcttccagggggaaacgcctggtatctttatagtcctgtcgggtttcgccacctctgacttgagcgtcgatttttgtgatgctcgtcaggggggcggagcctatggaaaaacgccagcaacgcggcctttttacggttcctggccttttgctggccttttgctcacatgttctttcctgcgttatcccctgattctgctagcttaagcggccgcgatggagcgacggccaggcggggagtgaggaaactcctgccccagcacccacggagcccactccggtggtgcccgccccttgtcggccagagggggcggggccgcgggcgatggggcggagcgggctgtgttctggtccgctcccgtgacgcgctgcccgccaggctgcgggggtcgcggggcgtccgcgtgggccagcggaggcccacagctgcggagggaaaccactgggaggggagaaggagctctagggagagcgaggctgcaacgaggggagagccgggcgacgggcaggggcccaggcgcgctccccgacttcccacaggcgcgcgcatgcctgcgtgtcagggcgcgcgctccccctctcggaccgaggcgaccccagtccgtgagcggcttggatcctcgcccgttccctcctggtcgtttccgcagtaacctcttatcagagcgggcagctgtgagtggcgctcacatccgccgctgccctgtcgaatgggggaaagagttcttgtgttctgaggagggtttggctatggtccttgaccctattcttgtctcagacttgcctcccaggtatcgaggtctccctgtgggtttcatatggcttggtcctttaggagctggaaaaattaggcataaagtccccccacccccttgacagaacgccccttctgactccagaggtcctttatcgagtgccaggcattggtctaggggcatttgaaaaagattcactgaaggacatttttaagagttcgctttctcagagggcagcttctcaaactcattcgctggtttcttttcctctttccgcctgtttaaggttagtgttccccaggtcctcttgccgtcttccttttcagagtttcctgagccatctcatccaggcccaacagctttgatcctgccgtgccccccataagaagtgacccctaagtgaatgtctctgcccacacttcccagcttgtggatctcgagagctcaagcttactagtgtggataaccgtattaccgccatgcat

SEQ ID NO: 43358 - DNA, 6289 bp, ARTIFICIAL SEQUENCE
  vector containing human replication origin
tagttattaatagtaatcaattacggggtcattagttcatagcccatatatggagttccgcgttacataacttacggtaaatggcccgcctggctgaccgcccaacgacccccgcccattgacgtcaataatgacgtatgttcccatagtaacgccaatagggactttccattgacgtcaatgggtggagtatttacggtaaactgcccacttggcagtacatcaagtgtatcatatgccaagtacgccccctattgacgtcaatgacggtaaatggcccgcctggcattatgcccagtacatgaccttatgggactttcctacttggcagtacatctacgtattagtcatcgctattaccatggtgatgcggttttggcagtacatcaatgggcgtggatagcggtttgactcacggggatttccaagtctccaccccattgacgtcaatgggagtttgttttggcaccaaaatcaacgggactttccaaaatgtcgtaacaactccgccccattgacgcaaatgggcggtaggcgtgtacggtgggaggtctatataagcagagctggtttagtgaaccgtcagatccgctagagcatgaccgagtacaagcccacggtgcgcctcgccacccgcgacgacgtcccccgggccgtacgcaccctcgccgccgcgttcgccgactaccccgccacgcgccacaccgtcgacccggaccgccacatcgagcgggtcaccgagctgcaagaactcttcctcacgcgcgtcgggctcgacatcggcaaggtgtgggtcgcggacgacggcgccgcggtggcggtctggaccacgccggagagcgtcgaagcgggggcggtgttcgccgagatcggcccgcgcatggccgagttgagcggttcccggctggccgcgcagcaacagatggaaggcctcctggcgccgcaccggcccaaggagcccgcgtggttcctggccaccgtcggcgtctcgcccgaccaccagggcaagggtctgggcagcgccgtcgtgctccccggagtggaggcggccgagcgcgccggggtgcccgccttcctggagacctccgcgccccgcaacctccccttctacgagcggctcggcttcaccgtcaccgccgacgtcgaggtgcccgaaggaccgcgcacctggtgcatgacccgcaagcccggtgcctagctgattggtctaaaatgagatacatcaacgctcctccatgttttttgttttctttttaaatgaaaaactttattttttaagaggagtttcaggttcatagcaaaattgagaggaaggtacattcaagctgaggaagttttcctctattcctagtttactgagagattgcatcatgaatgggtgttaaattttgtcaaatgctttttctgtgtctatcaatatgaccatgtgattttcttctttaacctgttgatgggacaaattacgttaattgattttcaaacgttgaaccacccttacatatctggaataaattctacttggttgtggtgtatattttttgatacattcttggattctttttgctaatattttgttgaaaatgtttgtatctttgttcatgagagatattggtctgttgttttcttttcttgtaatgtcattttctagttccggtattaaggtaatgctggcctagttgaatgatttaggaagtattccctctgcttctgtcttctgaaagagattgtagaaagttgatacaatttttttttctttaaatatttgatagaattctgcagtgaattctgcagtcgacggtaccgcgggcccgggatccaccggatctagataactgatcataatcagccataccacatttgtagaggttttacttgctttaaaaaacctcccacacctccccctgaacctgaaacataaaatgaatgcaattgttgttgttaacttgtttattgcagcttataatggttacaaataaagcaatagcatcacaaatttcacaaataaagcatttttttcactgcattctagttgtggtttgtccaaactcatcaatgtatcttaacgcgtaaattgtaagcgttaatattttgttaaaattcgcgttaaatttttgttaaatcagctcattttttaaccaataggccgaaatcggcgcggaacccctatttgtttatttttctaaatacattcaaatatgtatccgctcatgagacaataaccctgataaatgcttcaataatattgaaaaaggaagagtcaggatgaggatcgtttcgcatgattgaacaagatggattgcacgcaggttctccggccgcttgggtggagaggctattcggctatgactgggcacaacagacaatcggctgctctgatgccgccgtgttccggctgtcagcgcaggggcgcccggttctttttgtcaagaccgacctgtccggtgccctgaatgaactgcaagacgaggcagcgcggctatcgtggctggccacgacgggcgttccttgcgcagctgtgctcgacgttgtcactgaagcgggaagggactggctgctattgggcgaagtgccggggcaggatctcctgtcatctcaccttgctcctgccgagaaagtatccatcatggctgatgcaatgcggcggctgcatacgcttgatccggctacctgcccattcgaccaccaagcgaaacatcgcatcgagcgagcacgtactcggatggaagccggtcttgtcgatcaggatgatctggacgaagagcatcaggggctcgcgccagccgaactgttcgccaggctcaaggcgagcatgcccgacggcgaggatctcgtcgtgacccatggcgatgcctgcttgccgaatatcatggtggaaaatggccgcttttctggattcatcgactgtggccggctgggtgtggcggaccgctatcaggacatagcgttggctacccgtgatattgctgaagagcttggcggcgaatgggctgaccgcttcctcgtgctttacggtatcgccgctcccgattcgcagcgcatcgccttctatcgccttcttgacgagttcttctgagcgggactctggggttcgaaatgaccgaccaagcgacgcccaacctgccatcacgagatttcgattccaccgccgccttctatgaaaggttgggcttcggaatcgttttccgggacgccggctggatgatcctccagcgcggggatctcatgctggagttcttcgcccaccctagggggaggctaactgaaacacggaaggagacaataccggaaggaacccgcgctatgacggcaataaaaagacagaataaaacgcacggtgttgggtcgtttgttcataaacgcggggttcggtcccagggctggcactctgtcgataccccaccgagaccccattggggccaatacgcccgcgtttcttccttttccccaccccaccccccaagttcgggtgaaggcccagggctcgcagccaacgtcggggcggcaggccctgccatagcctcaggttactcatatatactttagattgatttaaaacttcatttttaatttaaaaggatctaggtgaagatcctttttgataatctcatgaccaaaatcccttaacgtgagttttcgttccactgagcgtcagaccccgtagaaaagatcaaaggatcttcttgagatcctttttttctgcgcgtaatctgctgcttgcaaacaaaaaaaccaccgctaccagcggtggtttgtttgccggatcaagagctaccaactctttttccgaaggtaactggcttcagcagagcgcagataccaaatactgtccttctagtgtagccgtagttaggccaccacttcaagaactctgtagcaccgcctacatacctcgctctgctaatcctgttaccagtggctgctgccagtggcgataagtcgtgtcttaccgggttggactcaagacgatagttaccggataaggcgcagcggtcgggctgaacggggggttcgtgcacacagcccagcttggagcgaacgacctacaccgaactgagatacctacagcgtgagctatgagaaagcgccacgcttcccgaagggagaaaggcggacaggtatccggtaagcggcagggtcggaacaggagagcgcacgagggagcttccagggggaaacgcctggtatctttatagtcctgtcgggtttcgccacctctgacttgagcgtcgatttttgtgatgctcgtcaggggggcggagcctatggaaaaacgccagcaacgcggcctttttacggttcctggccttttgctggccttttgctcacatgttctttcctgcgttatcccctgattctgctagcttaagcggccgcgataccgcatttccaataataaaaggggaaagaggacctggaaaggaattaaacgtccggtttgtccggggaggaaagagttaacggtttttttcacaagggtctctgctgactcccccggctcggtccacaagctctccacttgccccttttaggaagtccggtcccgcggttcgggtaccccctgcccctcccatattctcccgtctagcacctttgatttctcccaaacccggcagcccgagactgttgcaaaccggcgccacagggcgcaaaggggatttgtctcttctgaaacctggctgagaaattgggaactccgtgtgggaggcgtgggggtgggacggtggggtacagactggcagagagcaggcaacctccctctcgccctagcccagctctggaacaggcagacacatctcagggctaaacagacgcctcccgcacggggccccacggaagcctgagcaggcggggcaggaggggcggtatctgctgctttggcagcaaattgggggactcagtctgggtggaaggtatccaatccagatagctgtgcatacataatgcataatacatgactccccccaacaaatgcaatgggagtttattcataacgcgctctccaagtatacgtggcaatgcgttgctgggttattttaatcattctaggcatcgttttcctccttatgcctctatcattcctccctatctacactaacatcccacgctctgaacgcgcgcccattaatacccttctttcctccactctccctgggactcttgatcaaagcgcggccctttccccagccttagcgaggcgccctgcagcctggtacgcgcgtggcgtggcggtgggcgcgcagtgcgttctcggtgtggagggcagctgttccgcctgcgatgatttatactcacaggacaaggatgcggtttgtcaaacagtactgctacggaggagcagcagagaaagggagagggtttgagagggagcaaaagaaaatggtaggcgcgcgtagttaattcatgcggctctcttactctgtttacatcctagagctagagtgctcggctgcccggctgagtctcctccccaccttccccaccctccccaccctccccataagcgcccctcccgggttcccaaagcagagggcgtgggggaaaagaaaaaagatcctctctcgctaatctccgcccaccggccctttataatgcgagggtctggacggctgaggacccccgagctgtgctgctcgcggccgccaccgccgggccccggccgtccctggctcccctcctgcctcgagaagggcagggcttctcagaggcttggcgggaaaaagaacggagggagggatcgcgctgagtataaaagccggttttcggggctttatctaactcgctgtagtaattccagcgagaggcagagggagcgagcgggcggccggctagggtggaagagccgggcgagcagagctgcgctgcgggcgtcctgggaagggagatccggagcgaatagggggcttcgcctctggcccagccctcccgctgatcccccagccagcggtccgcaacccttgccgcatccacgaaactttgcccatagcagcgggcgggcactttgcactggaacttacaacacccgagcaaggacgcgactctcccgacgcggggaggctattctgcccatttggggacacttccccgccgctgccaggacccgcttctctgaaaggctctccttgcagctgcttagacgctggatttttttcgggtagtggaaaaccaggtaagcaccgaagtccacttgccttttaatttatttttttatcactttaatgctgagatgagtcgaatgccatctcgagagctcaagcttactagtgtggataaccgtattaccgccatgcat

SEQ ID NO: 43359 - DNA, 14 bp, Artificial Sequence
  Sequence for DpnI resistance/sensibility
gcggagcctatgga
